United States Patent Application Publication US 2015/0133362 A1 - sequence listing, part 2

SEQ ID NO: 162 - DNA, 67 bp, Homo sapiens
acttttaaaaatagaattcagtcctattatctgaaagaaactgtgatatagttaatattaaaaagaa

SEQ ID NO: 163 - DNA, 36 bp, Homo sapiens
aatcccaggggcctttaaaagtggcaggggaggcag

SEQ ID NO: 164 - DNA, 42 bp, Homo sapiens
ggaaggtaaaggaagcagacatgatccttaaatgcaggcagc

SEQ ID NO: 165 - DNA, 46 bp, Homo sapiens
aattttgcatgattgccatgcaatgagaatttcctggagcaaatta

SEQ ID NO: 166 - DNA, 93 bp, Homo sapiens
tggagttcattgctaataattataggaccagtttgagtgcaggagaaaagttggaagccaaacagaagtggctggagtggtgaatgggacacg

SEQ ID NO: 167 - DNA, 84 bp, Homo sapiens
aggaagtagatatggtacagtactcattggtgaattttgcctgtgaaggagagaaaaaaggtgataactagcagaaaatgtaga

SEQ ID NO: 168 - DNA, 78 bp, Homo sapiens
aattggcctttaataagaagggggacaatttctcagttaaaggggagataggataacagactggcagttggagggaag

SEQ ID NO: 169 - DNA, 35 bp, Homo sapiens
tattaaggcagagaaataaaccagtttggggagag

SEQ ID NO: 170 - DNA, 45 bp, Homo sapiens
ctctctgccctagttttttccatctgtaagatggagacaatattg

SEQ ID NO: 171 - DNA, 46 bp, Homo sapiens
tacttttattctgttttggttgcctactctgggagaacttcaggca

SEQ ID NO: 172 - DNA, 50 bp, Homo sapiens
acagtactgttgtcgtggggattgaaattccctgaaagagaagacaagag

SEQ ID NO: 173 - DNA, 49 bp, Homo sapiens
catttaaaagtagttaaatttctaagggcaatgcagtaaacaggtattg

SEQ ID NO: 174 - DNA, 44 bp, Homo sapiens
caaacaaaagacatagaactggtttgcttagtttgtaaaatgag

SEQ ID NO: 175 - DNA, 42 bp, Homo sapiens
acacacaaaagggatgtttggtctgcgcaggagtccatggtg

SEQ ID NO: 176 - DNA, 47 bp, Homo sapiens
taaaaattcaaaattattagttattcagtggttacaaatggataaat

SEQ ID NO: 177 - DNA, 44 bp, Homo sapiens
tataaaaactgatgtctatgagcagaccttaaattaatgtggac

SEQ ID NO: 178 - DNA, 49 bp, Homo sapiens
gaagtttagaaaactgattataaaatgctagtatcaaaatatcataaag

SEQ ID NO: 179 - DNA, 40 bp, Homo sapiens
gcagcttatcctgcattatacaaggatagcttcatttttc

SEQ ID NO: 180 - DNA, 63 bp, Homo sapiens
ttagcttgaagaaacctttgcttgctcactcttgtgcctaaaccaggtatcaagtctggacat

SEQ ID NO: 181 - DNA, 55 bp, Homo sapiens
ttactcaacatttcctaaagtcgtttcatgtctgccttagaaaatgaactcaagt

SEQ ID NO: 182 - DNA, 45 bp, Homo sapiens
tgccaatatatctgcttatgatttatggtaatgttttcctttagc

SEQ ID NO: 183 - DNA, 47 bp, Homo sapiens
cctttccacccctgccagcatcaatgtacttcgtaagactataaaaa

SEQ ID NO: 184 - DNA, 57 bp, Homo sapiens
gtgataatgaaatgtaccgcttagcagtatgcatgtaccagttgggactactggttt

SEQ ID NO: 185 - DNA, 23 bp, Homo sapiens
gataaaatggaagaaaattgaaa

SEQ ID NO: 186 - DNA, 72 bp, Homo sapiens
atgcccacttatctgtgtaggttcagttctaaaatgtttttcacagtgagtcactgtcattagctttccaaa

SEQ ID NO: 187 - DNA, 46 bp, Homo sapiens
tatgagaggaaagacaaggaagtgagggtgcctaagaaccagatag

SEQ ID NO: 188 - DNA, 101 bp, Homo sapiens
tgtacgagacttcacaaaggtacttaagaacaagttcaggtcgaagaagtactttgccaaacaccctcgacttggttacctgcctgtccagacagttcttg

SEQ ID NO: 189 - DNA, 47 bp, Homo sapiens
cacattatgattctaatctattttttattgaaaatgaagacagcaaa

SEQ ID NO: 190 - DNA, 56 bp, Homo sapiens
tcacaatctcctcaactgtttcatgatgacacccattcaagaatagaacaatatgc

SEQ ID NO: 191 - DNA, 48 bp, Homo sapiens
tggaaaggactaatgggtcttttctcactgatagcagctccaccacag

SEQ ID NO: 192 - DNA, 400 bp, Homo sapiens
ggtatgttattgataggtatcatagaactaattttttgtttgtttgttttgtttgttgttttgttttgtttttgagacagagtctcactctgtcgcccaggctggagtgcagtggcacaatctcagctcactgcaaccttggcttcccgggttcaagtgattctcctgcctcagcctcccgagtagctgggattataggtgcccaccaccaagcccaactaatttttgtatttttagtagagatggggtttcaccatgttggtcaggctggtctcaagctcctgacctcaagtgatctgcccatctcgacctcccaaagtgctgggattacaggcgtgagccaccgtgcccagccaactaattgtttttttaactaatattagaataagtttacctctat

SEQ ID NO: 193 - DNA, 47 bp, Homo sapiens
gttttattttatatctatctactatatctttacgctttgtccatttg

SEQ ID NO: 194 - DNA, 30 bp, Homo sapiens
gttcatatctatatctatatatttctagag

SEQ ID NO: 195 - DNA, 47 bp, Homo sapiens
agtgagccagccgcagagcccagctcagatcctgaagtcagtagaga

SEQ ID NO: 196 - DNA, 115 bp, Homo sapiens
ctacaggtggagtatgagcagctgaaggaccagcacctccgaagggggctccctgtcggttcaccgccagagtcgattatatctccccatcacacgtctgaggattcagaactta

SEQ ID NO: 197 - DNA, 55 bp, Homo sapiens
aaactcctcaggcagcacaaaggtcggctggaggctaggatgcagattttagaag

SEQ ID NO: 198 - DNA, 45 bp, Homo sapiens
tgttttatgggagttgcttgcaagctttctggatgataagaaata

SEQ ID NO: 199 - DNA, 53 bp, Homo sapiens
cagcattctgcactgagctactcgcttgatccagatgcctccggcccacagtt

SEQ ID NO: 200 - DNA, 46 bp, Homo sapiens
aggacctgctggccccaccgcacgacaccagcacggatctcacgga

SEQ ID NO: 201 - DNA, 44 bp, Homo sapiens
tgctagatgactagggacaacttttatttgaccaagaacagatt

SEQ ID NO: 202 - DNA, 38 bp, Homo sapiens
atgatcatgtagcaaaagaggggacgaaaagcagatgc

SEQ ID NO: 203 - DNA, 52 bp, Homo sapiens
attgacctaaaaaaaaaatgactggtaccacagaggtggttttgttactttg

SEQ ID NO: 204 - DNA, 52 bp, Homo sapiens
ttagtaataatgtgccacaaagccacagcagctttggagaacattttctttc

SEQ ID NO: 205 - DNA, 46 bp, Homo sapiens
ggatcttaactaaaagacaagggtatgtgaagtaggctaggggtgt

SEQ ID NO: 206 - DNA, 45 bp, Homo sapiens
agggagtgaggttggggaggaggtgtcagaagtgcgaggagagac

SEQ ID NO: 207 - DNA, 49 bp, Homo sapiens
ttcaccagcctcattcgctcaccattggtaccttcagcagaaagaaatg

SEQ ID NO: 208 - DNA, 87 bp, Homo sapiens
taggttgggtgggttggggggcaagggtgtctatttgcagcagagatattttgaaaagaagaaaattgttttatataaaaaggaaag

SEQ ID NO: 209 - DNA, 4046 bp, Homo sapiens
ggagcgcttccgagtgtaaatggcagttcttggcactcaccgttttcttttactgtgtttcaagcagagcagcaaactcttgtccgcttggcttccttttctactatctcaatcgttcctaggttttggttcctatagtaaattaatgaatagtgtttgcattacacagcatttccatcataatgcacactgttggatatatatgtgctatatacataaaatatagtacaaaataaaaattatatacatatattcattgtataattcctaaaatcttaaaaaattgaaacattagttttgtctttaaggctgtcaccttatgtttattttttaaacaccttatgtttatttcatacactcttgcttggtggtccatatgacagccggaagcgttctgaagggagagttagtgaatatcgacttgactggattggtttcagtaagaacatctggcttttacagaatatcatttgagggaagggaaatctagggcagaggtaacaataaattgcatttgtatagggcttgaagcttctaaagcaacatctcattcattgattctcagtttctcacctagccttctgtgaagatggtgttccctccattttataggtgtggaagacggagggtcacactgggatgcattgttcgtggtgaaactttgattctgtctcctgagaaccaaagattctgcatttggcaattagaaggagtcatcctttgccttaagtgtactcaaattcctctggccattaatggcaagtaacctcagtggctatcactatttaaatagccttctgttattcttctttctccccattttcctctgtactctgatcaccttttctgctgtatctttgcaacctgtaagggattttcattatcaagaagagaaaaatttgaaaaatcaccttgaggagagtggcaagtgaaacattatagtgaagaagtgttactgataatgggcaaatggaataaagtagtgtgtaaacagttgacttttctcttttatgggtgaataaaggctttgggtagcatagaagtggagatcttggctaagaccaatagtgaagaaaagcattagacttactgctccaaagtgatacactgtagttctttccaggaaagagaatttttccctgggcaaacttaattttccatgataaacttttatagacattcttctgaacaaagtttttgattcttgaatataataaaatacacttaagaatttagcaaatcctttatagttatgtacttgaatgaaagaatgtaatcatataataatccataaatttttagcagtagtagagcctataaaaaatgaaaaaagttttttagactctcataaaatctgtcagattgatgatccaatcctttatatccaactctctctctctctcttttttttttttttttttttgagatggagtctcacccactcggtcgtcaaggctggagtgcagtggcagcgatcttggcccactgcaacctttacctcctgagttcaatcaattcccctgcctcagcctcctgagtagctgggattacaggtgtttgccaccatgcctggctaatttttatatttttagtagagacagggtttcgccatgttggccaggctggtctcaaactcttgacctcaagtgttagccaggttggtcttgaactctggacctcaagtgatctgcctgcctcagcctcccaaagagctgggattacaggcatgagccaccatgctgggcccaactctctttttgtcatctccgcttatataactcagaggcatttcaagctctgcaaatccaaatcacattgatgattcctttctcccagcctgctatcctcagtgttgcccagctcaatgactcacacttcacctaattgcctaagccaaaattggggagtcattttgcacattttgcacattggatatgaatctctcatatccaatcaattcccaaatcctattgactttctttgatatctaaatatcccacatattcacccatttctttctatctactcttgtttagaccacacttgtttcctgcatataatattacaatagaaagaatagcacaataaacacccagatgtcctttttattttattttattttattatttaaaatttttatttacatggagtagagacaaggtctcaccatgttgcctaggctgatctcaaacttctgggctcaagtaatcctctcgcttaagcttcccaaagtactgggattacaggtgtgagccacctcgcctagacccagatgccctttaacaagttttcccacttactttattttttttgagatggaattttgcccttgtcacccaggctggagagtaatagcacaatttcggctcactgtaaccaccgcctcctggattcaagtgattctcctgcctcagcctcccaagtagctgggattacaggcacctgccaccacacccagctaatttttgtatttttttttaagtagagatggggtttcaccatgttggccaggctggtctcgaactcctgaactcaggtgatgcacctgccttggcttcccaaagtgctgggattacaggcgtgagccaccttgcccggcctagttttcccacttattttacaatacttactgcatttttctgtctgtctgtgtgtatgcatatatacatctacatacatatatcaacctaaatatacctatatcagtatagacagatatatgctattctgtttgaacttaagttgaagataccatcacacttcattgctaaatatttcaccacatgtctcttacaatcaaagacattctcctgcaacaataccataattaatgttaaagaaatttaacattgatacaataatattgtctaatacatagtccaaattcagatttttcaaatgatcctcaaatgttttattttaaaattctgaattcaatcaaagattacatttcattgtcatgtctatttagtctcctttaattcacaaagctccccctctcccaggtaattttggttttcaagacgctgacagttttgaagaaaccaggccatttcttttgaaaactagccacagtctagatttgtctgctcatgagaagattcacgttcaacatcttggcaaggatattgtgtagatgatgtggtgattttccattcaattgcatgatgccccatgattggttatgtgaattttgatcacttggttaagattaggaatttttccccaacatattactatgaaaaaattctcagacatacagaagagttgcaagaaattttcattcagcattcatatacccatgagctaggttccttaatttgcattttgctatattctgccatagtcttcactggttccccacatattactgtggtctacctacaagccacaatcgtctttttttttttttttttttttttttttttgagatggagtctcactctcgttgcccagggtggagtgcagtggcgtgatctcagctcactgcaacttccacctcccaggttcaagcaattctcctgcattagcctcctgagtagctgggattacaggtgcacaccaccatgcctggctaattttttttttttttttgtatttttagtagagacagggtttcactgtgctggccaggctggtctcgaactcctgacctcgtgatccacctgcctcggcctcccaaagtgctgggattacaggcatgagccaccgtgcccgtcccttgacgatcttttaaaaaggccaatttgaccatgttggttccctccttcgaaccatctactggctccccattgctcttcagataaagacacaaacccttgacctgttctccatggtcctatccctggtcctgcccagcttcttcacctggttcaacaggtacacttgtctcttggctgtcttctttccagaaacactggcttgtgctccattctttgactgctccatgattctttctgccacttcacataggaagctcttaccttttctctttctgtttccctttttggctaattaaattcttgtcatctttaaaggcttggctc

SEQ ID NO: 210 - DNA, 4046 bp, Homo sapiens
ggccaggctggtctcgaactcctgaactcaggtgatgcacctgccttggcttcccaaagtgctgggattacaggcgtgagccaccttgcccggcctagttttcccacttattttacaatacttactgcatttttctgtctgtctgtgtgtatgcatatatacatctacatacatatatcaacctaaatatacctatatcagtatagacagatatatgctattctgtttgaacttaagttgaagataccatcacacttcattgctaaatatttcaccacatgtctcttacaatcaaagacattctcctgcaacaataccataattaatgttaaagaaatttaacattgatacaataatattgtctaatacatagtccaaattcagatttttcaaatgatcctcaaatgttttattttaaaattctgaattcaatcaaagattacatttcattgtcatgtctatttagtctcctttaattcacaaagctccccctctcccaggtaattttggttttcaagacgctgacagttttgaagaaaccaggccatttcttttgaaaactagccacagtctagatttgtctgctcatgagaagattcacgttcaacatcttggcaaggatattgtgtagatgatgtggtgattttccattcaattgcatgatgccccatgattggttatgtgaattttgatcacttggttaagattaggaatttttccccaacatattactatgaaaaaattctcagacatacagaagagttgcaagaaattttcattcagcattcatatacccatgagctaggttccttaatttgcattttgctatattctgccatagtcttcactggttccccacatattactgtggtctacctacaagccacaatcgtctttttttttttttttttttttttttttttgagatggagtctcactctcgttgcccagggtggagtgcagtggcgtgatctcagctcactgcaacttccacctcccaggttcaagcaattctcctgcattagcctcctgagtagctgggattacaggtgcacaccaccatgcctggctaattttttttttttttttgtatttttagtagagacagggtttcactgtgctggccaggctggtctcgaactcctgacctcgtgatccacctgcctcggcctcccaaagtgctgggattacaggcatgagccaccgtgcccgtcccttgacgatcttttaaaaaggccaatttgaccatgttggttccctccttcgaaccatctactggctccccattgctcttcagataaagacacaaacccttgacctgttctccatggtcctatccctggtcctgcccagcttcttcacctggttcaacaggtacacttgtctcttggctgtcttctttccagaaacactggcttgtgctccattctttgactgctccatgattctttctgccacttcacataggaagctcttaccttttctctttctgtttccctttttggctaattaaattcttgtcatctttaaaggcttggctcaaatgtctcttcaagaaagccttctctaattgcccagggcaggtcagactcctctgctgtgtgctcttaatactctgtgcttctcctttgtatgatttgtagtctgtcagtattgtaatgaaataattcattatgtaattaattgcttagtgtgcataagcgccgtaatggcagaggctatgtctcttgttcatagtcataacaccattgcctggcttggtgctttacacgtggtaggcactcaataaatatttggtgaatgaatagttactacgaataactatataaaatatataaatacattttttcaagtcagtactttcccttttccttttaggtattgatgtcaagctgaaccatcgtaggaagttgaaagccttagaaagaggacttggtaaagtttttggattatcttgaaactctggcaagatggccaagtatggagaacatgaagccagtcctgacaatgggcagaacgaattcagtgatatcattaagtccagatctggtaggtaaaggaagctcaagaaagctatggatttttatgtatttagaaaacctatgtttcttggattgatttgcattgttcttgcaagaacttcttggaggtgaagttcttttaagaaactgaattctgacaaatgactataattttgtaaaaggtatatgtaaaaggtataatatctctgagtgtcctatcctttctcaacccaattttgtgcttagtgaaactgctgcttgtagctaaaggttgttcatttggaagactactccattaaaataaaatacgaccgaacatttctctttctattttctggaaattgaagggattatatgcttaatgtaggaagtgccacagtttctggcaggaaagatctttcacagtttgatttcattaccatatatcctcacccccatccctgttcatagccattgataggccaacaggtgtcctaccttgaaatatcttatgagccttctcaaggtaaaattttcacctaggtaatctaataaaccagactcagacagattcatggttttcacacgaacagttaaattggggtcctcaggataccaccccctcctccaatctttttatataaccgagtgctttttgactctggctgtacagatgaatcaactggggagttttaaaaaacgcagatgcattggctccattccagacccattgaataaaaatttctgtatttttaaaaagcttcaaatatgattctgagacaaactcaaaggggagatatttttgaacaggcagaacacttctcagccttgaaaattacacagaactccaccctgagtgtgaacactatacttaagtaactttgaaaagttactttgaggtataaaattacatccagtgtcactttaaagacaaaaaaggaacccaaagcctgtttttgctgtgtgaaccatctttatgttctgttaggagcttgtttcttattatgtgaaactgtagaaatacacagtgaaaataagatctaaattaactgtcttaaaatacacattttcctccatgataccggtgttggttgattgataaagattttagttattacagatttggctgtaaatatgtagcaactattgtgtagcttgacgggtcttttgaaggtatagcttaatatcttgttttaaaatatgctttgaggatgttctcttcctgtaaaattctttttgttttaaatgttttagtggtataaggtactacaaaaatgtaagggattattaatatcatcttaggagtacggaatacatattcagacatatgtaaatataacagaggaaaatggaagagagacgatttaatgtctccatactagtcattttctataaattgtgaggaggtatattcctaaatagttttctgagtcagccttcattctagtaagacctttgatatttataacttgtactttagccgtgtccataaaagagtaattatctaatttcagaaataccgtgtatatataatgaacatataaactcccaaactattttaatttaaaattatcttttaaaaaggctgatgaacctaaaatattgctggagaacaatttggcaaaaatgataacatgtttttaacacatgcatatcaattaactgagtaattctgtttctagagtttttccctaggcaatacataaaaaggtacactcaagaaattgatcacagtatcatttataatagaaaacattgtaaacaccatgaaaatctaatattaggaattggttagatcattatttcccaaagtatttcgaaaagatcaaaagttctaggattgttaatgtgtaattcacaaaaggatgttatggtcaaatagctttaggaaatagttgtttaaacctattattctgtttctttactctagcacatctgaacagatcatacatgatctcagtagaggtaactaaattagggtatatccataaagtagaagattaagcattcataaaaagtgatacagatgtgtgtgatgtgtgtgtg

SEQ ID NO: 211 - DNA, 4042 bp, Homo sapiens
aggctggtctcgaactcctgacctcgtgatccacctgcctcggcctcccaaagtgctgggattacaggcatgagccaccgtgcccgtcccttgacgatcttttaaaaaggccaatttgaccatgttggttccctccttcgaaccatctactggctccccattgctcttcagataaagacacaaacccttgacctgttctccatggtcctatccctggtcctgcccagcttcttcacctggttcaacaggtacacttgtctcttggctgtcttctttccagaaacactggcttgtgctccattctttgactgctccatgattctttctgccacttcacataggaagctcttaccttttctctttctgtttccctttttggctaattaaattcttgtcatctttaaaggcttggctcaaatgtctcttcaagaaagccttctctaattgcccagggcaggtcagactcctctgctgtgtgctcttaatactctgtgcttctcctttgtatgatttgtagtctgtcagtattgtaatgaaataattcattatgtaattaattgcttagtgtgcataagcgccgtaatggcagaggctatgtctcttgttcatagtcataacaccattgcctggcttggtgctttacacgtggtaggcactcaataaatatttggtgaatgaatagttactacgaataactatataaaatatataaatacattttttcaagtcagtactttcccttttccttttaggtattgatgtcaagctgaaccatcgtaggaagttgaaagccttagaaagaggacttggtaaagtttttggattatcttgaaactctggcaagatggccaagtatggagaacatgaagccagtcctgacaatgggcagaacgaattcagtgatatcattaagtccagatctggtaggtaaaggaagctcaagaaagctatggatttttatgtatttagaaaacctatgtttcttggattgatttgcattgttcttgcaagaacttcttggaggtgaagttcttttaagaaactgaattctgacaaatgactataattttgtaaaaggtatatgtaaaaggtataatatctctgagtgtcctatcctttctcaacccaattttgtgcttagtgaaactgctgcttgtagctaaaggttgttcatttggaagactactccattaaaataaaatacgaccgaacatttctctttctattttctggaaattgaagggattatatgcttaatgtaggaagtgccacagtttctggcaggaaagatctttcacagtttgatttcattaccatatatcctcacccccatccctgttcatagccattgataggccaacaggtgtcctaccttgaaatatcttatgagccttctcaaggtaaaattttcacctaggtaatctaataaaccagactcagacagattcatggttttcacacgaacagttaaattggggtcctcaggataccaccccctcctccaatctttttatataaccgagtgctttttgactctggctgtacagatgaatcaactggggagttttaaaaaacgcagatgcattggctccattccagacccattgaataaaaatttctgtatttttaaaaagcttcaaatatgattctgagacaaactcaaaggggagatatttttgaacaggcagaacacttctcagccttgaaaattacacagaactccaccctgagtgtgaacactatacttaagtaactttgaaaagttactttgaggtataaaattacatccagtgtcactttaaagacaaaaaaggaacccaaagcctgtttttgctgtgtgaaccatctttatgttctgttaggagcttgtttcttattatgtgaaactgtagaaatacacagtgaaaataagatctaaattaactgtcttaaaatacacattttcctccatgataccggtgttggttgattgataaagattttagttattacagatttggctgtaaatatgtagcaactattgtgtagcttgacgggtcttttgaaggtatagcttaatatcttgttttaaaatatgctttgaggatgttctcttcctgtaaaattctttttgttttaaatgttttagtggtataaggtactacaaaaatgtaagggattattaatatcatcttaggagtacggaatacatattcagacatatgtaaatataacagaggaaaatggaagagagacgatttaatgtctccatactagtcattttctataaattgtgaggaggtatattcctaaatagttttctgagtcagccttcattctagtaagacctttgatatttataacttgtactttagccgtgtccataaaagagtaattatctaatttcagaaataccgtgtatatataatgaacatataaactcccaaactattttaatttaaaattatcttttaaaaaggctgatgaacctaaaatattgctggagaacaatttggcaaaaatgataacatgtttttaacacatgcatatcaattaactgagtaattctgtttctagagtttttccctaggcaatacataaaaaggtacactcaagaaattgatcacagtatcatttataatagaaaacattgtaaacaccatgaaaatctaatattaggaattggttagatcattatttcccaaagtatttcgaaaagatcaaaagttctaggattgttaatgtgtaattcacaaaaggatgttatggtcaaatagctttaggaaatagttgtttaaacctattattctgtttctttactctagcacatctgaacagatcatacatgatctcagtagaggtaactaaattagggtatatccataaagtagaagattaagcattcataaaaagtgatacagatgtgtgtgatgtgtgtgtgtgtgtgtgtgtgtatgaatatagaaatgtgttcttgatatagtaagtaaacaagtatgtattatatgaagtcatttatatgaaaaatgttttttaaaaatttagtgaagtatacaataaatgttaatagtggtcatcttggcatttgagattattacttttttttttgctgatttatattttctaaagttcttcaatgaacccacattactgagttcttatatttttaaagattatcaaattgcttagagtgtttagatgccaaggttatgactattactttttttgtggtggcatctacttcaaaacacactgaaaatttagttgttacatagctcagatatgaatcacattcttttggctgaattatgttgcaaaagccagtagataaatttggatttgaatggacccattagtcccaatctggcttcctctaagggactttttttgattcttttaaggcaaatgcttactatacagaggtaatatttcatggtactctaaaacttacatattttaagagatttttagtttagattaagtcataggaattgtctacatatcatatatgtattttaaagatcctctgtctacatgctgtatgccaaattggttgcttttccattttttaaaagggaatactttcctttaggaaaattttgatcctcatctgctcttccaggtttcttttttggggggaaattggatgaaagtggggggacggagagtgtggtttctgctctccaaatcctcgagtttggacaatccaaaaggctggcataattaaattggcataataaaaatgtctatgcattttatgttaagttattgtgattatttttattgtcctcacttagtattactttgtttcatgccattttgaatattataattttttaaattttataattttaaagccatttctaccatctaaacagaaataggaagttgtcaagggtacgtaatgaagtagtttcataaatacaaagccatgtatttatttatggttgtagtatacttgccttgggtttgggtgagtgttagaaaggaactggaaagaatttgatctataatgaccaaggatttggtgttgggtaaaagtagacctgtctttctctaactt

SEQ ID NO: 212 - DNA, 4053 bp, Homo sapiens
ccaagtatggagaacatgaagccagtcctgacaatgggcagaacgaattcagtgatatcattaagtccagatctggtaggtaaaggaagctcaagaaagctatggatttttatgtatttagaaaacctatgtttcttggattgatttgcattgttcttgcaagaacttcttggaggtgaagttcttttaagaaactgaattctgacaaatgactataattttgtaaaaggtatatgtaaaaggtataatatctctgagtgtcctatcctttctcaacccaattttgtgcttagtgaaactgctgcttgtagctaaaggttgttcatttggaagactactccattaaaataaaatacgaccgaacatttctctttctattttctggaaattgaagggattatatgcttaatgtaggaagtgccacagtttctggcaggaaagatctttcacagtttgatttcattaccatatatcctcacccccatccctgttcatagccattgataggccaacaggtgtcctaccttgaaatatcttatgagccttctcaaggtaaaattttcacctaggtaatctaataaaccagactcagacagattcatggttttcacacgaacagttaaattggggtcctcaggataccaccccctcctccaatctttttatataaccgagtgctttttgactctggctgtacagatgaatcaactggggagttttaaaaaacgcagatgcattggctccattccagacccattgaataaaaatttctgtatttttaaaaagcttcaaatatgattctgagacaaactcaaaggggagatatttttgaacaggcagaacacttctcagccttgaaaattacacagaactccaccctgagtgtgaacactatacttaagtaactttgaaaagttactttgaggtataaaattacatccagtgtcactttaaagacaaaaaaggaacccaaagcctgtttttgctgtgtgaaccatctttatgttctgttaggagcttgtttcttattatgtgaaactgtagaaatacacagtgaaaataagatctaaattaactgtcttaaaatacacattttcctccatgataccggtgttggttgattgataaagattttagttattacagatttggctgtaaatatgtagcaactattgtgtagcttgacgggtcttttgaaggtatagcttaatatcttgttttaaaatatgctttgaggatgttctcttcctgtaaaattctttttgttttaaatgttttagtggtataaggtactacaaaaatgtaagggattattaatatcatcttaggagtacggaatacatattcagacatatgtaaatataacagaggaaaatggaagagagacgatttaatgtctccatactagtcattttctataaattgtgaggaggtatattcctaaatagttttctgagtcagccttcattctagtaagacctttgatatttataacttgtactttagccgtgtccataaaagagtaattatctaatttcagaaataccgtgtatatataatgaacatataaactcccaaactattttaatttaaaattatcttttaaaaaggctgatgaacctaaaatattgctggagaacaatttggcaaaaatgataacatgtttttaacacatgcatatcaattaactgagtaattctgtttctagagtttttccctaggcaatacataaaaaggtacactcaagaaattgatcacagtatcatttataatagaaaacattgtaaacaccatgaaaatctaatattaggaattggttagatcattatttcccaaagtatttcgaaaagatcaaaagttctaggattgttaatgtgtaattcacaaaaggatgttatggtcaaatagctttaggaaatagttgtttaaacctattattctgtttctttactctagcacatctgaacagatcatacatgatctcagtagaggtaactaaattagggtatatccataaagtagaagattaagcattcataaaaagtgatacagatgtgtgtgatgtgtgtgtgtgtgtgtgtgtgtatgaatatagaaatgtgttcttgatatagtaagtaaacaagtatgtattatatgaagtcatttatatgaaaaatgttttttaaaaatttagtgaagtatacaataaatgttaatagtggtcatcttggcatttgagattattacttttttttttgctgatttatattttctaaagttcttcaatgaacccacattactgagttcttatatttttaaagattatcaaattgcttagagtgtttagatgccaaggttatgactattactttttttgtggtggcatctacttcaaaacacactgaaaatttagttgttacatagctcagatatgaatcacattcttttggctgaattatgttgcaaaagccagtagataaatttggatttgaatggacccattagtcccaatctggcttcctctaagggactttttttgattcttttaaggcaaatgcttactatacagaggtaatatttcatggtactctaaaacttacatattttaagagatttttagtttagattaagtcataggaattgtctacatatcatatatgtattttaaagatcctctgtctacatgctgtatgccaaattggttgcttttccattttttaaaagggaatactttcctttaggaaaattttgatcctcatctgctcttccaggtttcttttttggggggaaattggatgaaagtggggggacggagagtgtggtttctgctctccaaatcctcgagtttggacaatccaaaaggctggcataattaaattggcataataaaaatgtctatgcattttatgttaagttattgtgattatttttattgtcctcacttagtattactttgtttcatgccattttgaatattataattttttaaattttataattttaaagccatttctaccatctaaacagaaataggaagttgtcaagggtacgtaatgaagtagtttcataaatacaaagccatgtatttatttatggttgtagtatacttgccttgggtttgggtgagtgttagaaaggaactggaaagaatttgatctataatgaccaaggatttggtgttgggtaaaagtagacctgtctttctctaacttaaaagcacatatgccaagttcatcatcaagtactgtattattaacagccttaattagtaggctttagaaagttcaacaagttagtaaatattttgaaacaataggccaagactaagaatttttaaaaagtgaaatttattgccagtagagtgtgtgatgcagaaagtactgcttggaacattttaaacatgaaataataaaatggtttgggatgcatatacaatcgaagaatatcctcactgctatttcattcaataattaacatacattaaagctagtaacacagaataagtcatccttttctgttgctgtcagtgttgttgtggttttatcccagagccctgtagaaagagtagacctcagggctaaggacagtgtgtcagctggctccatgtggagttcttgacagtttgggattatagactctcagctgggaaagaactgtttgatgaatgaaatagttgggcaagcttcacatttttggataattcaatgtgttcttcaagcgaccttgggctggaagcctgtgtgtaacaattttatcatttcttcctttgcattttctcttcttgtctaatcttaggatctaattgttgagggaaccttaaacgccctataacccagccattcctgtgatgtgctcacccagtctctgtttgcacacctccaatgatggcatctcactgctgctgctgatgatgacgattctagcaacttacactaattgaacacattctgtgtgcagatgtggtgctaacagtttaatcctcacaaccgccattttgcagatgataaatgtgagccatactgaagtgatttgtggcactggacttctttctatttctccaaaggcccagtg

SEQ ID NO: 213 - DNA, 4039 bp, Homo sapiens
gacgattctagcaacttacactaattgaacacattctgtgtgcagatgtggtgctaacagtttaatcctcacaaccgccattttgcagatgataaatgtgagccatactgaagtgatttgtggcactggacttctttctatttctccaaaggcccagtgtgtcttcctcagggcctttgcacatctctcttcttccatctttgcctggctggttccttcttgtcatttagatgtaggcctaatgtcacctcttcagagatcttccttgctgactttagaaagtagctctcccagtcactcttgactgcatctctgtatttacgttccctgtgttgttcttagcactctctggtaccttttctggtactgtgtgttcattaatagccttcccactagaacagggctccccaactcccagggcctggactggtaccagtccgttgcctgttagggaccaggtggcacagcaggaggtgagtggtggctgagcaagcactaccgcctgagctctgcctcctgtcagatcagcggcagcattagattctcataggagtgagactctatggtgaaccgcacatgcgagggatctaggttgcctgctccttatgagaatctaatgcctgatgatctgaggtagaacagtttcatcccaaaaccatccccctcatcccttggaaaaattgtctgccatgaaactggtccctggtgccaaaaaggctggggactgctgcactttaattaactccccaagagcagggaccaatacatccctggtactgagcccaatgcctggctcataataggtgagcaataaatgtttattcaatgataaaggctacagagtctggaagtgccagagctggcatttgaactcagatgatctgactctagaaaccctgcatttgacctctatggagtgcccagtctcctaactcacaagacattttattccattgctgctcggtgactcttcttcattttgtgcctaattctgtcccttacacattttgcactgtattaattgtatttatacagctcttctatctctttttttgtagttttcaggggtgggaccctggactgtgaggtagagctcctctggaccccaggttagtatctcagagccctgacaagggaaggccaattgtaagagacacagcctactgcttctgggccagttgcatcctttcttgatttttggctctagtctctgtcattctctgttgagttagcaaaggggaaaataccagaggacaaacagtcctttgggtggaagatagagaaatggataatgtgtttctgacatgaattcctttttctcttttcttctgactactgctcaaggcttttaacgagctgaagttaaaaaaaaaaaaggtagtggatttcataaggactgacatttggcacagtgtaggtcctggtccgatgcccagataggtatctgtggtactgaaagagttggttgaggagtgtaggggaaggaagcaaagggttggttgaggagtgtaggggaaggaagcaaagagagaccagtgaaataaaaataaaacaaattattaaatatgaaatattataccaggttacatttatagcaagcctcctgaaaatctgctatgtttggaaagtaaacttgcttaacaagattcaattttatgaaaattctgaggaggattaccttatttgtttatctttctgaggcctttcttgaggaaagacagtggttaagttgtatttaggcagtcatcggtctatttctttcttttatgtttaaagcagtatctgtgaggggatttttctaaacagctcaagggactgtgaaaaaatagttcattttttgtttctcctgaagctttccttggctggaatacctgtgctttgaagggaggtctttgagcaggtttgtttttttccatgagccctggggatttgtagtgatagacagtaaccctgatggaaattcaactctggcagagaagggcagctattcttgtcctgcttgtaaagatattctccatgttgttacctcattatgctgaagtagtgcaatcatgagaaagtttttttgtattaatgtgattctcatgacctgttactatggttgtgaaacttttagaggagatccattcccgactggaaaacgtgaattgctgaggatgattctaagcaaaggaagtacgttaattatatagacagaacagagaactcaattttattgaaccttatttgtacccagaagtttgaactagatgctgatatgatgatttttctgggaacaagtcaacatgcaagactatttgagcagctgtaaatattagttaaaatttaatctaaagcaatggagaaagggtactctgctgaagtggtttcagatgcattggctggatttttttttctccccttaaattgtgtggaggcatagacatttactatgttatatttttatctttttatatgccttaactgtttaataataaatagacttatttcaatatttgaaatgtgaggcagtatgagttcttaatgtatacttactctcgagatgatggctcttggactgagaaattgaaaccaggtcccagtcctttcgcttttacttcctgtgacactggatttgcacatgtcaattccaggaagcaggtagtttccagcatccatgtggttttccaatctttgcatttgtgcctttaaacaaccaaatacctgacgtttattaatatcctgtggggctcttctatcagaagcacattctcttggcccggttcataagggaaatgtctgtgtatgcgcatctggcagctaagattaaggtttacagtggtataacctcaccttcacttttaagaaattaagtttaaaaaaaatgcagatctgtctttcatagcagtggagctcaacaacacatagagcatgagagtcacattttttgtgtgaatattttcgaatgagccttttttggtatgtggacgggtggctagttacattcagttcaatccttttaacatttaattatggaacaaaatcttttttcaaagtgtagagaaaagcatataagggcatttctgatgtagcagaggaatccaataaaaaatatgactttgtgtctctaaagtggtacagctttgaaattaacacatctgtataatttcaaaagtatgatctctttagatctttttctttaatttcatagtcttaatttttgcaaatttcttcaactccattctctaattaagattttggtatacaatatttatatgcaaaagatttttggtgcaggaaataacattttgaggttgatactaattgatttgttcacttgcccctcaaaggctacgtgtgagtcatgttatttaacattgatccagtcaatatgtagatttatgcacatgcttttattttgaaaactaggttttgagcttctcacatatggagttcctaattcaagctttatgtcagaaccacccttctgggtccagactcagatatgtggggtggggtcccagcatctggagttttaacaagttctgtgggctattctctttagtgctcttaatttatagacaaggaaggcaggtttaaaagtcatagaaccaaagtgaaaatgatctgcattttagaggagcaaggaaagctacaacgtttattatttctacttataaacacttccctttaaataatttgaaaagataatagatttcatgatgttgggcattttttcttttacactgtattttgaagagtttgggttgtgttgggtgaagttaaaagtgaggaaagtgggtcaggagagtgatgaaacctggtgcatttcttattttggcccattgaaccagaagatgataccaatatatctagtgccgacatatttctccactgcgctccttagttattgctgcagtgtgttcaaggtcttcttgctgtgagtgtaacatcacatcttgaactctttttctagggaatgcatcagcttagagtccgctgatgcattcattataaaaatgtattgtgtatattttctattacattatttcaaagacag

SEQ ID NO: 214 - DNA, 4024 bp, Homo sapiens
tcaccttcacttttaagaaattaagtttaaaaaaaatgcagatctgtctttcatagcagtggagctcaacaacacatagagcatgagagtcacattttttgtgtgaatattttcgaatgagccttttttggtatgtggacgggtggctagttacattcagttcaatccttttaacatttaattatggaacaaaatcttttttcaaagtgtagagaaaagcatataagggcatttctgatgtagcagaggaatccaataaaaaatatgactttgtgtctctaaagtggtacagctttgaaattaacacatctgtataatttcaaaagtatgatctctttagatctttttctttaatttcatagtcttaatttttgcaaatttcttcaactccattctctaattaagattttggtatacaatatttatatgcaaaagatttttggtgcaggaaataacattttgaggttgatactaattgatttgttcacttgcccctcaaaggctacgtgtgagtcatgttatttaacattgatccagtcaatatgtagatttatgcacatgcttttattttgaaaactaggttttgagcttctcacatatggagttcctaattcaagctttatgtcagaaccacccttctgggtccagactcagatatgtggggtggggtcccagcatctggagttttaacaagttctgtgggctattctctttagtgctcttaatttatagacaaggaaggcaggtttaaaagtcatagaaccaaagtgaaaatgatctgcattttagaggagcaaggaaagctacaacgtttattatttctacttataaacacttccctttaaataatttgaaaagataatagatttcatgatgttgggcattttttcttttacactgtattttgaagagtttgggttgtgttgggtgaagttaaaagtgaggaaagtgggtcaggagagtgatgaaacctggtgcatttcttattttggcccattgaaccagaagatgataccaatatatctagtgccgacatatttctccactgcgctccttagttattgctgcagtgtgttcaaggtcttcttgctgtgagtgtaacatcacatcttgaactctttttctagggaatgcatcagcttagagtccgctgatgcattcattataaaaatgtattgtgtatattttctattacattatttcaaagacagacgtgtttttgaatcatggtgggaaaaaaactcctcacattcaacctctatgctagttttcttatcttaagggggggtggttagagaaatgtattatatatgtattaatatttgcctccctgttttttaattctaaataggtgacatatttaatataactatgcttgcttttgaaataatttgcctaccattctttaaaatgagtgaattttaaaagatgtatagtgatttttatgtgaagatgaattaaagagttaagtgacatagaccaccgtagcattttccctatggatctgtaaaaacagcccaaaagtcttgtgatttttttttttttttgagccgtagtcttcctcttgctctgttgcccaggctggagtgcagtggtgccatctcagctcactgcaacctctgcctcctaggatcaagtgattctcccacctcagcttcatgagtagctgggactacaggtgtgtgccaccatgcctggctaatttttgtatttttggtagagatggggtttcaccatgtcagccaggctggtctcgaacttctgacctcaagtgatctacccacctcagcctctcaaagtgctggaaatacaggcatgagccatggttcccggcctcttgtgatatccttatattcagttaaccaaaccaaatcaagtcaaataacaaaccccaaaccttttatagaccttgagttatttgcagatctttggggttatttacctgtcttttgagctttaatcttttacctctttgaagatacaggaagggatctttatttcttctttgataaaataaccttcagagtgacttgagatacggaattgcttctttgtatatcattgtgtggtatttgagatcacatctcaaaatttaatgagacctgctcctcaggcagttttaagattaaggatcaaaaagggagccactggaaaggtgtgagtggctggtaatctatgttagaacagagactttggtgcagaggttggccatgttcatatgtggagtaagttttcatgaaacaggaggaagccttttcttatttgaaactaagaaactgcaaaataaaagtaataaaataccccgaagcaaatagactttaaaacaacatttggtcctaagttgtatatgaccaatttcttaaagtgattgttatattgccagttttgaaattatattatcttttaaaatttaaaatgtaaatattgtctcaggggtgggaggatgaatctccatcttatttagtgttaaaggctcctggacttaccctaaagcccagctttttcggtggggggctcataaataaaactgtgtgtgttctagtttactctgttacctcatctagttcctttaggtgattagaaaatgccgtattagcaaatataaaaaggtttacttttgtgtttttacatgtgaaatcaatggccagttctataatgttaacatatcagacccttaattatatattaactcccattttgatagtttgtatagaaaaatcagagttgacttgaattatttgaacttgcatacgctttttcaagatacgtaacgtgttgtaaattagaagagtgttggtgttttcggaacacatgcatatgcttgctgtctcagggcagccttgttgggcatttggtgtcagacataccttattctgagggccttggcatcaaggcagattgctcagagagggggtctctctgcatatatgtctaagggagacatttagggaagtctcatgccatcctatctttctttctttctttttttttttttttttttttttttgagacagggtcttgctccattgcccaggctggagtgcagtgactcaatttcagccctccgcctcccaggttcaagtgattcttctgcctcagcctcccaagtagctgggattacaggtgcctgccaccatgcttggctactttttgtatttttagtagaagtggagtttcaccacgttgccgaggctggtcctgagctcctaacctcaagtgaaccgcctgccttggcctcccaaaatactggattacaggcgtgagacactgctcatggccaccatcctactttctaacagcactgccccaccctccccctcgccccaaaaaccaccatgaaggaggcagagggcaccaggtgaagactgcccatggtccttttcttacctctgtgacttcgcttgttttgtgttctgggcttgattgttctccttctccctgcgtccccagttttgcaacctccatctttaaaacatcagcatcagtgccaccaggtgttctgctctctgtgctatctgcatgccagaatcaatctttcccacgtgttcactcttcatttctgtttgtggcccttctggcttgtgtatgtctatatgccttttttcatctgactttctgatgctagcctttagcttagtctccacacacacagtaagtgcttaacaaagacttgtggccgtgtgcagtggctcatgcctgtaatcccagcactttgggaggctaaggtgggtggatcatctgaggtcaggagttcgagaccagcctggccaacatgctgaaacctcgtctctactaaaaatacaaaaatcagccaggcgtggtggcactcacctgtaatcccagctacttgggaggctgaggcaggagaatcgcttgaactgggaggcagaggttgtagtgagacgagattgtgccaatgcactccagcctgggcaacagagtgagactctgtctcaaaaaaaaagacttgctatgccttttaatggttttaaaaattacacttgcttacatacatacctcattc

SEQ ID NO: 215 - DNA, 4068 bp, Homo sapiens
aaggaggcagagggcaccaggtgaagactgcccatggtccttttcttacctctgtgacttcgcttgttttgtgttctgggcttgattgttctccttctccctgcgtccccagttttgcaacctccatctttaaaacatcagcatcagtgccaccaggtgttctgctctctgtgctatctgcatgccagaatcaatctttcccacgtgttcactcttcatttctgtttgtggcccttctggcttgtgtatgtctatatgccttttttcatctgactttctgatgctagcctttagcttagtctccacacacacagtaagtgcttaacaaagacttgtggccgtgtgcagtggctcatgcctgtaatcccagcactttgggaggctaaggtgggtggatcatctgaggtcaggagttcgagaccagcctggccaacatgctgaaacctcgtctctactaaaaatacaaaaatcagccaggcgtggtggcactcacctgtaatcccagctacttgggaggctgaggcaggagaatcgcttgaactgggaggcagaggttgtagtgagacgagattgtgccaatgcactccagcctgggcaacagagtgagactctgtctcaaaaaaaaagacttgctatgccttttaatggttttaaaaattacacttgcttacatacatacctcattcattcagcaaatggttattgttcattcattgttagatgctgggctcagagataagcaagacccacctctgttcttaagatgctctcaggctagttggaaagaaagacatcaataaacatccccacacaaaccagggacacatggagggaggaaggatgtcttgctttggttggaatgagggtaggtttgagtaagagagcgtgaaagaggcaaggaatttgaggtgtgccttgaaggatgtgtaagaggcaacgctgtggacagtgtgggaagaacattgcagatgatgagaaaagagcaaggcatttgaagtctgtccctggtaactgagtgtggctggggtaatggggatgatgggagaagctggggtcagatttcgaaagcccttttgaagcagggtttatttgatctttccctgtaagaagccactacaggattttaggtgagttaatgactagctcagaactgtttttcagaaagataacttggctggcagcaggaaagatagatttggaaggtagcagagttagggggaggcagggaacaggtaagagttgtgaaaaaattgaggttaaggagtataaggacttggaccagagtggtacaagaggagactgagcaggggaaaggatgtgaaaagtggttagcagttagtaacagggtgtgcaaagcctcaatgtaaacttcgcctttgtgggatttgttagttagtaacagtatgtttaaagcctctaggtaaatttcacctttgtgggactttttagtaacagtatctataaagccgcaatgtaaacttcaccttggtgggatttgctttatgttttcaatgaggtatgtagtttttcaaatcgtactgtaattcagattttcaacactttcggttattagctttttctctagaattttcttgatcaatttcttaaccgtttacagttacttctacttcttactgaagttgactactgctgtttttctcacagtacctcttggtcagtttatatggggaacttcaaattcagttcagctgcaataggatctgtatttttttctatatatattctgagagaagggtcatgctttaggaaaaagttgatgaaaatgagaaaagagatggtttattcatgtctatgcagtatactattaacagttctttgaaaaagtagcaaagaaaggtaatgttaatctcatcttaaatgaaggtaaaactcttgcacagctaagagaaaatctatatactaaaagagtttggaaaactacttcagaggaactttaattaaagagtagtctaatgtgatgctgtgaagataatgccatcctctattagtaatttcagcttcaacaaataggatagaataaatgcaaattaaaaataaattaggagcagatgttgagaaatatcttacatttagggaattcttaagtggtagaagggccctggagttcagttaataaagctgggatgctcagaaattataataattcaggtaacaaatgctttccttaatgtgatgctctgctgtggaggttttgggaatagaagaaagaagaggctgttattgtcatactgtttgtaagttcatctttctttacattcagtggataactaaaatctactatatatgctgatatttcagaaatggtggttcccttaaccttcaagaaaaaacaaaagctctcatttgtaaacacttgcaagcattcttgggttgtctcttggtggtacccaagtttttgctttggccggtaagagacttttgcatagtactttgttgccttgcctctacaacatgttaggcttgtggattggcgcatggtgaataagacacagttccagttgtcgactgtctgtcacctagagagggcaggtacacaggaatttaagaaaacagattaaacaggcagttacacagttgtaaaagtaaaaacagcacagattgctgtgtgagctcacgggagtggtacctgacatcccagggcttcaaggaaggcatcttggaagagtggatatctaagctgagatctgaaagaatgagtggggatgtggggaggctgttaagacagagggagttgatgacaagaggtttggaggtgagaattgtgaggttttcaatatggctaaagcaggatgctggagaatgaagctgagaagagtgttataagccatctttaggagtttgagttgtatcctaagcataatggtgaatctttgaaagggctttaaaattaaaaaaatttatatttatatatttatcatttttaaaattctgaagtattcaatctaaaaaaatgtacaggaaatgatatatcagatatgctcgtgccctcatttgaaatttatcagctgttaatgttttgacttttttttttttttgaaatggagtttcactcttgttgcccaggctggagtgcaatggcgcgatctcggctcactacaatctccccttcctgggttcaaacaattcttgtgcctcagccacccgaatagctgagattacaggcatataccatcatgcccagctaattttttttgtatgttttgtagagacatggtttcaccatgttggccaggctggtaatgttttgacgtatttgatttaggttgtattttaaagagctaattatgtcagcatagataaatcttaaaaacaatttgactacaaacaaaaatcaggttgcacaatgtattgaatggtactgtatataaagctcatatacctgcagaaattgccctgcagtgtttatgtattcatattataaatatatagcaaaatacaaaaatttttatggaaattataaacactagatttctttagagatagtgagagaggaggttcttcagttttatctataatatttaattcctcaatgaaaatagaaatagaatcttaaattaatatgaaataatgctgatttgtgaactgagtgatgactgtcttaagcccagttccttggaagtaggatttgagacagagatttgtgtgcacttgagaacaattcctgttaatgaaagaaatgagggaagaaggactgggccagggaaaagctgaagtgtagttgagttacagcagggccaccattggatccatagggaatgctggtgctgggatggcccttcagagatttcccaacttgaggcaatgtgttgagcctggggacctttgccttgaccagtaggcttttggctgaccctgggaaggaggtgaggtgaaaatctgggcaaggtaacttggccaagggcagttcctggacggatgctcagctatgagccctcagctgctgggggaatgaatttgtgcattgccttgcctgaaaggcagatctggataggagattcactgcagtcatggaccttgtaccattttcttttgcctattattgtctat

SEQ ID NO: 216 - DNA, 4045 bp, Homo sapiens
tgcgtccccagttttgcaacctccatctttaaaacatcagcatcagtgccaccaggtgttctgctctctgtgctatctgcatgccagaatcaatctttcccacgtgttcactcttcatttctgtttgtggcccttctggcttgtgtatgtctatatgccttttttcatctgactttctgatgctagcctttagcttagtctccacacacacagtaagtgcttaacaaagacttgtggccgtgtgcagtggctcatgcctgtaatcccagcactttgggaggctaaggtgggtggatcatctgaggtcaggagttcgagaccagcctggccaacatgctgaaacctcgtctctactaaaaatacaaaaatcagccaggcgtggtggcactcacctgtaatcccagctacttgggaggctgaggcaggagaatcgcttgaactgggaggcagaggttgtagtgagacgagattgtgccaatgcactccagcctgggcaacagagtgagactctgtctcaaaaaaaaagacttgctatgccttttaatggttttaaaaattacacttgcttacatacatacctcattcattcagcaaatggttattgttcattcattgttagatgctgggctcagagataagcaagacccacctctgttcttaagatgctctcaggctagttggaaagaaagacatcaataaacatccccacacaaaccagggacacatggagggaggaaggatgtcttgctttggttggaatgagggtaggtttgagtaagagagcgtgaaagaggcaaggaatttgaggtgtgccttgaaggatgtgtaagaggcaacgctgtggacagtgtgggaagaacattgcagatgatgagaaaagagcaaggcatttgaagtctgtccctggtaactgagtgtggctggggtaatggggatgatgggagaagctggggtcagatttcgaaagcccttttgaagcagggtttatttgatctttccctgtaagaagccactacaggattttaggtgagttaatgactagctcagaactgtttttcagaaagataacttggctggcagcaggaaagatagatttggaaggtagcagagttagggggaggcagggaacaggtaagagttgtgaaaaaattgaggttaaggagtataaggacttggaccagagtggtacaagaggagactgagcaggggaaaggatgtgaaaagtggttagcagttagtaacagggtgtgcaaagcctcaatgtaaacttcgcctttgtgggatttgttagttagtaacagtatgtttaaagcctctaggtaaatttcacctttgtgggactttttagtaacagtatctataaagccgcaatgtaaacttcaccttggtgggatttgctttatgttttcaatgaggtatgtagtttttcaaatcgtactgtaattcagattttcaacactttcggttattagctttttctctagaattttcttgatcaatttcttaaccgtttacagttacttctacttcttactgaagttgactactgctgtttttctcacagtacctcttggtcagtttatatggggaacttcaaattcagttcagctgcaataggatctgtatttttttctatatatattctgagagaagggtcatgctttaggaaaaagttgatgaaaatgagaaaagagatggtttattcatgtctatgcagtatactattaacagttctttgaaaaagtagcaaagaaaggtaatgttaatctcatcttaaatgaaggtaaaactcttgcacagctaagagaaaatctatatactaaaagagtttggaaaactacttcagaggaactttaattaaagagtagtctaatgtgatgctgtgaagataatgccatcctctattagtaatttcagcttcaacaaataggatagaataaatgcaaattaaaaataaattaggagcagatgttgagaaatatcttacatttagggaattcttaagtggtagaagggccctggagttcagttaataaagctgggatgctcagaaattataataattcaggtaacaaatgctttccttaatgtgatgctctgctgtggaggttttgggaatagaagaaagaagaggctgttattgtcatactgtttgtaagttcatctttctttacattcagtggataactaaaatctactatatatgctgatatttcagaaatggtggttcccttaaccttcaagaaaaaacaaaagctctcatttgtaaacacttgcaagcattcttgggttgtctcttggtggtacccaagtttttgctttggccggtaagagacttttgcatagtactttgttgccttgcctctacaacatgttaggcttgtggattggcgcatggtgaataagacacagttccagttgtcgactgtctgtcacctagagagggcaggtacacaggaatttaagaaaacagattaaacaggcagttacacagttgtaaaagtaaaaacagcacagattgctgtgtgagctcacgggagtggtacctgacatcccagggcttcaaggaaggcatcttggaagagtggatatctaagctgagatctgaaagaatgagtggggatgtggggaggctgttaagacagagggagttgatgacaagaggtttggaggtgagaattgtgaggttttcaatatggctaaagcaggatgctggagaatgaagctgagaagagtgttataagccatctttaggagtttgagttgtatcctaagcataatggtgaatctttgaaagggctttaaaattaaaaaaatttatatttatatatttatcatttttaaaattctgaagtattcaatctaaaaaaatgtacaggaaatgatatatcagatatgctcgtgccctcatttgaaatttatcagctgttaatgttttgacttttttttttttttgaaatggagtttcactcttgttgcccaggctggagtgcaatggcgcgatctcggctcactacaatctccccttcctgggttcaaacaattcttgtgcctcagccacccgaatagctgagattacaggcatataccatcatgcccagctaattttttttgtatgttttgtagagacatggtttcaccatgttggccaggctggtaatgttttgacgtatttgatttaggttgtattttaaagagctaattatgtcagcatagataaatcttaaaaacaatttgactacaaacaaaaatcaggttgcacaatgtattgaatggtactgtatataaagctcatatacctgcagaaattgccctgcagtgtttatgtattcatattataaatatatagcaaaatacaaaaatttttatggaaattataaacactagatttctttagagatagtgagagaggaggttcttcagttttatctataatatttaattcctcaatgaaaatagaaatagaatcttaaattaatatgaaataatgctgatttgtgaactgagtgatgactgtcttaagcccagttccttggaagtaggatttgagacagagatttgtgtgcacttgagaacaattcctgttaatgaaagaaatgagggaagaaggactgggccagggaaaagctgaagtgtagttgagttacagcagggccaccattggatccatagggaatgctggtgctgggatggcccttcagagatttcccaacttgaggcaatgtgttgagcctggggacctttgccttgaccagtaggcttttggctgaccctgggaaggaggtgaggtgaaaatctgggcaaggtaacttggccaagggcagttcctggacggatgctcagctatgagccctcagctgctgggggaatgaatttgtgcattgccttgcctgaaaggcagatctggataggagattcactgcagtcatggaccttgtaccattttcttttgcctattattgtctatttctatgtctgaaagatatgacatattaaataaaaaaagcttccaatttctaggagcagtattcaccgaactacttcc

SEQ ID NO: 217 - DNA, 4060 bp, Homo sapiens
tagcttagtctccacacacacagtaagtgcttaacaaagacttgtggccgtgtgcagtggctcatgcctgtaatcccagcactttgggaggctaaggtgggtggatcatctgaggtcaggagttcgagaccagcctggccaacatgctgaaacctcgtctctactaaaaatacaaaaatcagccaggcgtggtggcactcacctgtaatcccagctacttgggaggctgaggcaggagaatcgcttgaactgggaggcagaggttgtagtgagacgagattgtgccaatgcactccagcctgggcaacagagtgagactctgtctcaaaaaaaaagacttgctatgccttttaatggttttaaaaattacacttgcttacatacatacctcattcattcagcaaatggttattgttcattcattgttagatgctgggctcagagataagcaagacccacctctgttcttaagatgctctcaggctagttggaaagaaagacatcaataaacatccccacacaaaccagggacacatggagggaggaaggatgtcttgctttggttggaatgagggtaggtttgagtaagagagcgtgaaagaggcaaggaatttgaggtgtgccttgaaggatgtgtaagaggcaacgctgtggacagtgtgggaagaacattgcagatgatgagaaaagagcaaggcatttgaagtctgtccctggtaactgagtgtggctggggtaatggggatgatgggagaagctggggtcagatttcgaaagcccttttgaagcagggtttatttgatctttccctgtaagaagccactacaggattttaggtgagttaatgactagctcagaactgtttttcagaaagataacttggctggcagcaggaaagatagatttggaaggtagcagagttagggggaggcagggaacaggtaagagttgtgaaaaaattgaggttaaggagtataaggacttggaccagagtggtacaagaggagactgagcaggggaaaggatgtgaaaagtggttagcagttagtaacagggtgtgcaaagcctcaatgtaaacttcgcctttgtgggatttgttagttagtaacagtatgtttaaagcctctaggtaaatttcacctttgtgggactttttagtaacagtatctataaagccgcaatgtaaacttcaccttggtgggatttgctttatgttttcaatgaggtatgtagtttttcaaatcgtactgtaattcagattttcaacactttcggttattagctttttctctagaattttcttgatcaatttcttaaccgtttacagttacttctacttcttactgaagttgactactgctgtttttctcacagtacctcttggtcagtttatatggggaacttcaaattcagttcagctgcaataggatctgtatttttttctatatatattctgagagaagggtcatgctttaggaaaaagttgatgaaaatgagaaaagagatggtttattcatgtctatgcagtatactattaacagttctttgaaaaagtagcaaagaaaggtaatgttaatctcatcttaaatgaaggtaaaactcttgcacagctaagagaaaatctatatactaaaagagtttggaaaactacttcagaggaactttaattaaagagtagtctaatgtgatgctgtgaagataatgccatcctctattagtaatttcagcttcaacaaataggatagaataaatgcaaattaaaaataaattaggagcagatgttgagaaatatcttacatttagggaattcttaagtggtagaagggccctggagttcagttaataaagctgggatgctcagaaattataataattcaggtaacaaatgctttccttaatgtgatgctctgctgtggaggttttgggaatagaagaaagaagaggctgttattgtcatactgtttgtaagttcatctttctttacattcagtggataactaaaatctactatatatgctgatatttcagaaatggtggttcccttaaccttcaagaaaaaacaaaagctctcatttgtaaacacttgcaagcattcttgggttgtctcttggtggtacccaagtttttgctttggccggtaagagacttttgcatagtactttgttgccttgcctctacaacatgttaggcttgtggattggcgcatggtgaataagacacagttccagttgtcgactgtctgtcacctagagagggcaggtacacaggaatttaagaaaacagattaaacaggcagttacacagttgtaaaagtaaaaacagcacagattgctgtgtgagctcacgggagtggtacctgacatcccagggcttcaaggaaggcatcttggaagagtggatatctaagctgagatctgaaagaatgagtggggatgtggggaggctgttaagacagagggagttgatgacaagaggtttggaggtgagaattgtgaggttttcaatatggctaaagcaggatgctggagaatgaagctgagaagagtgttataagccatctttaggagtttgagttgtatcctaagcataatggtgaatctttgaaagggctttaaaattaaaaaaatttatatttatatatttatcatttttaaaattctgaagtattcaatctaaaaaaatgtacaggaaatgatatatcagatatgctcgtgccctcatttgaaatttatcagctgttaatgttttgacttttttttttttttgaaatggagtttcactcttgttgcccaggctggagtgcaatggcgcgatctcggctcactacaatctccccttcctgggttcaaacaattcttgtgcctcagccacccgaatagctgagattacaggcatataccatcatgcccagctaattttttttgtatgttttgtagagacatggtttcaccatgttggccaggctggtaatgttttgacgtatttgatttaggttgtattttaaagagctaattatgtcagcatagataaatcttaaaaacaatttgactacaaacaaaaatcaggttgcacaatgtattgaatggtactgtatataaagctcatatacctgcagaaattgccctgcagtgtttatgtattcatattataaatatatagcaaaatacaaaaatttttatggaaattataaacactagatttctttagagatagtgagagaggaggttcttcagttttatctataatatttaattcctcaatgaaaatagaaatagaatcttaaattaatatgaaataatgctgatttgtgaactgagtgatgactgtcttaagcccagttccttggaagtaggatttgagacagagatttgtgtgcacttgagaacaattcctgttaatgaaagaaatgagggaagaaggactgggccagggaaaagctgaagtgtagttgagttacagcagggccaccattggatccatagggaatgctggtgctgggatggcccttcagagatttcccaacttgaggcaatgtgttgagcctggggacctttgccttgaccagtaggcttttggctgaccctgggaaggaggtgaggtgaaaatctgggcaaggtaacttggccaagggcagttcctggacggatgctcagctatgagccctcagctgctgggggaatgaatttgtgcattgccttgcctgaaaggcagatctggataggagattcactgcagtcatggaccttgtaccattttcttttgcctattattgtctatttctatgtctgaaagatatgacatattaaataaaaaaagcttccaatttctaggagcagtattcaccgaactacttccctgacacatacatacctcacaccctgcacacaccacacaccacaaaccgtagctgtaatatcaggttacatactttctgttttattttcccttttctctgtgtttttggttacttgagatggcctcctctctctcactcctggtttgggaaggccttgcttcctctgaaagcttgtgagcagagggctgatctgatcagatttgc

SEQ ID NO: 218 - DNA, 4046 bp, Homo sapiens
tgctcagctatgagccctcagctgctgggggaatgaatttgtgcattgccttgcctgaaaggcagatctggataggagattcactgcagtcatggaccttgtaccattttcttttgcctattattgtctatttctatgtctgaaagatatgacatattaaataaaaaaagcttccaatttctaggagcagtattcaccgaactacttccctgacacatacatacctcacaccctgcacacaccacacaccacaaaccgtagctgtaatatcaggttacatactttctgttttattttcccttttctctgtgtttttggttacttgagatggcctcctctctctcactcctggtttgggaaggccttgcttcctctgaaagcttgtgagcagagggctgatctgatcagatttgctcttctgagtggtgctctagaagccacgtggagcatggatggtgtggggtgtgtgctggatgaggcaagcctggggttctggaggacctttgggtggctgtcacagttagaggataagaggtattgaagccaaaactgagattgaggtagctgggaaggaggagaggggagagtttagaagctttaggtaggaggcagacctgataggacatggtggtggtcttcagatgatgggtggtggatgggatggagagagaagcctggtttttgactttaacactcgcaaatgaagcctttctttctaggttttgtggagagggcagtgcataaggggatagtaagtgaagttctagattgagttttgaggtgcctggagatatctgggaaaaatatgtaatatatatatttctcttacatgtatgagactggcttgggctggggtctgcccttgaaaactggcagctggagtcttgagtactttcctgagtcattttttgagctctttgcaagataatgttaaaaattcaagaggccgggtgtggtggatcatgcctggaatcccagcactttgaaaggccgaggcgggcggatcacctgaggtcaggagttcaagaccagcctggccaacatagtgaaaccctacctctactaaaaatacaaaaaaaaaaaaaattacctgggcatggggtcgcgcacctgtagtcccagctactcaggaggctaaggcatgggaataatttgaacctgggaggtggaggctgcggtgagtcaatatcacatcactgcactccagcctgggtggcagagtgtgactctgttgaaaaaaaaaaaaatcaagaactgttgcatattttatttatctttgtattttctgagatatttttgactgaccctaaaatgagcatctggatggtagatgacggcagcggaagatgaagaattaagaagtggtttttgatttgtaatattttttagtagatattattagttgatgccgcagttgttgactgtatttatctcccaagggcataggaagcccccttgcagatattactctacctagcctgactgggtgtttggggagggagagaagaggttaacaataaatcctgcaatatgtgcagaagtttttacacttgtgtttctgcatattttcttagaaaaagggtccacagttttcattatattctcaaaggagacctatgacttaatgaaaagttaagtcttgttagaggaagagtgacatattatagggttatgtcttcataatgtttctttttttctgaaattagattggcagtccaatacgctggcacgaactgagggtctcacacttttgctgtaactcaaattctggtccttactttacttctactgccttaaagccactcaaacaaaagacctgattgctagaattaggttgagaagacacaaagtttgaagggcaaaatttctgataatgtttgacccagttttgcatataatgtatttttatttgttgatgaatatttcccttttgttgctaaaagtggcaaataatcagacatagattactaattaacagtctgcctcagttttttttttttttaattaatgaaacttgggcttcatcaagctcaggtggaatggatatcacagtgctttattttttctgacatcaaaagaaatttctttgtcaaagtgtagacatgtttgttgtgactgccttttgtgtgggttcttttctcccagccctctcctactacaggagagagagataatggccctttgctcctcattccgcattcagaccagattccccagctgcaatctcctgccatcggattgcatcaccaactcaacctaattggtgagatgtcactccctccctccaccgctcactctcatttctcagtgagtttagctctgtcactctctctaaaagttactcttgttttagtgatttgggtgtaaacattgatgatccttctaatactctgtcctcttaatttctctaagttctctttctagtgatcttgtctcccagtgtggtgggtatattctggctagaccaggtcattgtttatggtggcagcccctctgtcatctgaatttaagcgtcccattttttcggtactagcatggctcactgcaacctccgcctcctgggctccagcaatcctcccaccctcgggtagctggggctataggcatgtgccaccacgcctggctaatttttgtatttttttttgtagataagaggtttcaccatgttgcccaggctggtctcaaactcctgggctcaagcaatccatccacctcagcctcccgaagtgttgggattacaggtgtgagccaccatgcccggctgactttgcctactcttgccctaagaaaattgaagcaaaccaaagaggaatccagaaacttcaataccacatctatcctcaaccagaacccacccaaggccaccctaaccgtgtacattgtacccatcctcctttacttactcaaagtcacctcccttctctcttctgcatccctatgatttcccctttagtggatccgcttacaaacatgctattgtttttcttctagcaaaactttactttgatcccacctgtctctgtagctaccacgccattcctctggtcccctttatgaaagagctcctcaaagattgtatgtaccaacatttgcagttcgtctcctttcattccctcttaagaccactcaaatcaggcagaccccctaccagtccagtaaaactgctcttgtcaaagttattagggacctccttgttgctaaatccagtagcctgttctcagtccttaccttattccacctctcaatagcatcaacactgctgatcactccctcctccatgactctttcttcatttggcttctaggacaccccacacgctcctggtttcccacccattatcttttgctgattcttcctcttaacgttggagggcccaggacccagtccttggacctcctctctgtccccactgttgccgtttgtcatctcaccagtatcctggtttaaatactatctgaatgctggctcaaatttctatctctagcccagacctcttcctctgaactgcatacttgcatttccagttgtttacttcacatcttctatgttcagatctgaaaatctgaactcctgatctcccgtaaaccccaaagctgatcccacagtcttgcttgtctcagataaaggcaatgtgattcttccaattgccccagttttggagtcatctttgtagtcctttctttctcgtatacccacatccaatgcagcagatcctgctggttctattttcctaatactgaatttatacagaatccggtcatattttacgatctccactgctactgtcctggtctaggggaccattgctttttctggaattgcctccttacttgtctctctgcttcctcccttggcccatggaggctggtctgaaccccacagtagagggatccttttcaaatcagaagtggatatgttgcttcaggtttccaagtctgcagtgactccccattccagttgtaataaacgcgaaagaccttacagtgatctacaggaccctgtttatcctgcctggcttcatctccccttactagtttgtgctcatt

SEQ ID NO: 219 - DNA, 4051 bp, Homo sapiens
cacaagaatcgcttgaacccaggaggcagaggttgcattgagctgagatcgtgctactgcacgccagcctggataacagagcaagatgctgtctcaaacacaaacaaacaaacaaaaaacaaacaagtgtgcaatccctgagaaaaatatcagttcaatctttgttgatctttattgtcccgattgattagctgcatgtcagcctttgactgtgtttcccagatgctcacgacagatcgatcacttgatgttgttttcaacaggcagtcatgaaatgagcagactgaggtcagtgtagtatagatatttgtcagcgtggttgccaactgcctttcctcttctaagattgccctttattgtgtgattatattacatttttagttggcatgaaaatgcccatttagtgaaatgatgaggatcttcctgggggaagaattctggcgtaagaagctttcttcagattactaagcactctaaaaggtcccaggttatggggctctggaaagtaacgatgcgaatacttcacttggttatgtgatttttatttttgccttggaagtctttctgcaaacaagtcttccagtggaggctcattttaggaatgtgacgatgcattgctgataggtaggatgtggctttctatacagcagagtttggggggtgggactggcaggtgagtagctcaacccaggcttctgagggtccttcatgtcttttggaacacaatttgaaaatcactgctttaattgctaaattctagaaaacctggatgccctatttaaaaaaagagcttagcttagtgtcaaagaggaactaggttccagttttagctctgcagatcaccagctgtgtgaccttgaatatgtcactcaagctgtctgcacaattaattgatttgtttgtaaggtaaggagtatggactagatgacctcacactgatcactttctaagctccagaaaacctaattgttaatgcttaattgtgcgagctgtgctcgggaagggctgtgttctagtaccttcttcctcatcactgtcatttcagtattatctacactgatcttcacaaatattctgcacacttggattctaacctgcaatattgctgttggggttatagaaatatagattatatgatggtatttagggtaagcatttttatctctaaaatgagttagatatcaaggatggcatggtattagattacacaatatttgaaaagaataataagaaaaatcctgcaggatttaaaaatcttattagtactcttctgtagaaatactttagggaatggttcagacagtatcaggtgctgtgggtgtaagcatggccacctgctagctctgtgaacctggacaaatggcttagctgctctgtgcctgagtaaagtagagatagtaatagcatcaacctcctcgtgttgtaaaaagtaagtgaattaacatatataaagcaatttggggccaggcgcggtggctcatgcctgtaatcccagcactttgggaggccgagacgggtggatcacgaggtcaggagatcgagaccatcctggctaacacggtgaaaccccgtctctactaaaaatacaaaaaattagccggcctgatggcaggcgcctgtagtcccagctactcggaaggctgaggcaggagaatggtgtgaacccaggaggcggagcttgcagtgagccgagattgcgccactgcactccagcctgggtgacagagcaagactccatctcaaaaaaaaaaaaaaagcaatttggaacatagaagcactcaagaaatgtaagccgttacctccatacaaataattattataatgtgggtttatttctttccagtcttttaaaataagcatgtaaaaatagttttaatcatattgcactaggaagatttgtttttgtttcttaaatatatacagaatttccctttttctgcttctttatatttaataacaagacattctaggatagactaagccttttcatggctaattgtcctgtggaattcttttagtttttctcttccatgtttatatatttgatatgattttctggtagaattcttgaaaaaataactgcatcacacagtagctctcctctcccattttattttattttacttgctgaggctggatattatattcttttggctgaagtcaccatagtggattcatacaactaatttccagccagtttatgtagatcatttgcaaatgtattagttacagagaggctccaggggtgtaccaaagaaacctcaaaatacagtggctcaaataaaatcagagtttatttctttctctccttacagttcagagttggtgggtgatggagggtgggaaggtggctccgcttcatatggtctctcagggatcctggttccttctctcttgttctgcctttccaaagtgttgttccattttcttgatgaggcttgcccctcaacactatgtcaagttctagtccaaggaaagagaaaagagaagtaaaaaataagcaattttttaaaacgtgcatggccctcaggttgcattcctgatttcttttcacatcccactggctgctgcttagccacgtggactcatcttgctgcaagggaggttgagaaatatggcttgtgctgagctagaactgtggggatggaggagaagagcaggtttctgatactgaaaaaaaaaaaaagaaaagaaaatagaaaggagaatggataataataaatatacatatgctttgatcacaatttcatgggccaagtttgagtttggaattttccaagtcctcagattctatgacagaacatggtggtggagagagctgccccctggctccagtttgcagactttcccctttgtctgcccatgctggctccatttggcactgggaagggctttgcacccaagtttgtggtcagttggccaagcacccatggtctcccactcttccccacttgcaaacagtagtgtggtccacccttgcttgggaaagagcccagtgctcatttgagcagtgagtactaggaccctgtgcctctagaccgtgctttaggacttgcatatccccttggtcctctgatttctctatttctgggggagagatggggatggaagagggtagagtgaggccctctaaaagtcaggatttaaggcaaggtccttgcttgtctaggtctacaggtgatgctacaaagagaatgttacattgattcagttcttaaaattttcccttttcctcatgcttctgtttcattaatattcatatttactttttataatatacatgttatgtctttaatacactaggagtagaatatttgtaatgaaatggagtgctgttttaatggatgagaaaggtagggaggggctcagagagggaggctggagaatattcacttatttagcttaatgttttcaacagcttaaaaaaagagaaaaaacaacctttgagtggcccttgtgattaaatggcagtttgcccagactagagggagccagcgttgggaataaaaactaagattcactttgaaaatctagaaaaaaaaaatgactacacaagtcataagaatgtgcttgatggcttgggttgtctgagtgcaagtgaagtagggcgcaggcctggtttccgcattccctgtctgctcagccttttagctcctaaccccatccactccctagagctggccagcccagacccaggacctggatgctgacctcttcagggcggagctgttgctgtgctcagacatcgtgacaacttgttgatgggaaatgtagctgaaagtctagcacaaaaagctgctcttgggttggccagcgaacctccttcatggtaaaactccccatcccttatccaaatccttgggaccagatatgcttcagaatttatgatttttctttttcccatttcagaaaggctatggcccatatgccctatgttacataaagcctccagaggagtttgggacagtaccctatcatccaatatcttcatcattctgcagaaaatgtatgaatatttacactaagtggaacacaaacagggttataaata

SEQ ID NO: 220 - DNA, 4035 bp, Homo sapiens
aaaacaaacaagtgtgcaatccctgagaaaaatatcagttcaatctttgttgatctttattgtcccgattgattagctgcatgtcagcctttgactgtgtttcccagatgctcacgacagatcgatcacttgatgttgttttcaacaggcagtcatgaaatgagcagactgaggtcagtgtagtatagatatttgtcagcgtggttgccaactgcctttcctcttctaagattgccctttattgtgtgattatattacatttttagttggcatgaaaatgcccatttagtgaaatgatgaggatcttcctgggggaagaattctggcgtaagaagctttcttcagattactaagcactctaaaaggtcccaggttatggggctctggaaagtaacgatgcgaatacttcacttggttatgtgatttttatttttgccttggaagtctttctgcaaacaagtcttccagtggaggctcattttaggaatgtgacgatgcattgctgataggtaggatgtggctttctatacagcagagtttggggggtgggactggcaggtgagtagctcaacccaggcttctgagggtccttcatgtcttttggaacacaatttgaaaatcactgctttaattgctaaattctagaaaacctggatgccctatttaaaaaaagagcttagcttagtgtcaaagaggaactaggttccagttttagctctgcagatcaccagctgtgtgaccttgaatatgtcactcaagctgtctgcacaattaattgatttgtttgtaaggtaaggagtatggactagatgacctcacactgatcactttctaagctccagaaaacctaattgttaatgcttaattgtgcgagctgtgctcgggaagggctgtgttctagtaccttcttcctcatcactgtcatttcagtattatctacactgatcttcacaaatattctgcacacttggattctaacctgcaatattgctgttggggttatagaaatatagattatatgatggtatttagggtaagcatttttatctctaaaatgagttagatatcaaggatggcatggtattagattacacaatatttgaaaagaataataagaaaaatcctgcaggatttaaaaatcttattagtactcttctgtagaaatactttagggaatggttcagacagtatcaggtgctgtgggtgtaagcatggccacctgctagctctgtgaacctggacaaatggcttagctgctctgtgcctgagtaaagtagagatagtaatagcatcaacctcctcgtgttgtaaaaagtaagtgaattaacatatataaagcaatttggggccaggcgcggtggctcatgcctgtaatcccagcactttgggaggccgagacgggtggatcacgaggtcaggagatcgagaccatcctggctaacacggtgaaaccccgtctctactaaaaatacaaaaaattagccggcctgatggcaggcgcctgtagtcccagctactcggaaggctgaggcaggagaatggtgtgaacccaggaggcggagcttgcagtgagccgagattgcgccactgcactccagcctgggtgacagagcaagactccatctcaaaaaaaaaaaaaaagcaatttggaacatagaagcactcaagaaatgtaagccgttacctccatacaaataattattataatgtgggtttatttctttccagtcttttaaaataagcatgtaaaaatagttttaatcatattgcactaggaagatttgtttttgtttcttaaatatatacagaatttccctttttctgcttctttatatttaataacaagacattctaggatagactaagccttttcatggctaattgtcctgtggaattcttttagtttttctcttccatgtttatatatttgatatgattttctggtagaattcttgaaaaaataactgcatcacacagtagctctcctctcccattttattttattttacttgctgaggctggatattatattcttttggctgaagtcaccatagtggattcatacaactaatttccagccagtttatgtagatcatttgcaaatgtattagttacagagaggctccaggggtgtaccaaagaaacctcaaaatacagtggctcaaataaaatcagagtttatttctttctctccttacagttcagagttggtgggtgatggagggtgggaaggtggctccgcttcatatggtctctcagggatcctggttccttctctcttgttctgcctttccaaagtgttgttccattttcttgatgaggcttgcccctcaacactatgtcaagttctagtccaaggaaagagaaaagagaagtaaaaaataagcaattttttaaaacgtgcatggccctcaggttgcattcctgatttcttttcacatcccactggctgctgcttagccacgtggactcatcttgctgcaagggaggttgagaaatatggcttgtgctgagctagaactgtggggatggaggagaagagcaggtttctgatactgaaaaaaaaaaaaagaaaagaaaatagaaaggagaatggataataataaatatacatatgctttgatcacaatttcatgggccaagtttgagtttggaattttccaagtcctcagattctatgacagaacatggtggtggagagagctgccccctggctccagtttgcagactttcccctttgtctgcccatgctggctccatttggcactgggaagggctttgcacccaagtttgtggtcagttggccaagcacccatggtctcccactcttccccacttgcaaacagtagtgtggtccacccttgcttgggaaagagcccagtgctcatttgagcagtgagtactaggaccctgtgcctctagaccgtgctttaggacttgcatatccccttggtcctctgatttctctatttctgggggagagatggggatggaagagggtagagtgaggccctctaaaagtcaggatttaaggcaaggtccttgcttgtctaggtctacaggtgatgctacaaagagaatgttacattgattcagttcttaaaattttcccttttcctcatgcttctgtttcattaatattcatatttactttttataatatacatgttatgtctttaatacactaggagtagaatatttgtaatgaaatggagtgctgttttaatggatgagaaaggtagggaggggctcagagagggaggctggagaatattcacttatttagcttaatgttttcaacagcttaaaaaaagagaaaaaacaacctttgagtggcccttgtgattaaatggcagtttgcccagactagagggagccagcgttgggaataaaaactaagattcactttgaaaatctagaaaaaaaaaatgactacacaagtcataagaatgtgcttgatggcttgggttgtctgagtgcaagtgaagtagggcgcaggcctggtttccgcattccctgtctgctcagccttttagctcctaaccccatccactccctagagctggccagcccagacccaggacctggatgctgacctcttcagggcggagctgttgctgtgctcagacatcgtgacaacttgttgatgggaaatgtagctgaaagtctagcacaaaaagctgctcttgggttggccagcgaacctccttcatggtaaaactccccatcccttatccaaatccttgggaccagatatgcttcagaatttatgatttttctttttcccatttcagaaaggctatggcccatatgccctatgttacataaagcctccagaggagtttgggacagtaccctatcatccaatatcttcatcattctgcagaaaatgtatgaatatttacactaagtggaacacaaacagggttataaatagcctcaggtcagttcaggtcacgttttgctgccaaatgggttatggaaaaagcctttggtttccagagcttttcagatcctggcattgtggataaggga

SEQ ID NO: 221 - DNA, 4035 bp, Homo sapiens
tttatagatagacagatttactactggacattctctggcagagaaaaatttcatggaaagtgaagtttaatgtgaaatggcacataagtggtcctgacttgcaaactcaggaatggcttgttgaccactgtcctggaataagagagcccagctttgttcttgtcttatttctggatcgccctttctcctttgtaccttctgacattgtttctgagttccctcctcccatctgccacccgctcctttgcaactctgtagagcattttaataacaggttgtttgtgcctgtcttgcctctgcagcactcactcccacctgtttcctcagcctctgacttctcctttcccctttttggcatgctctgacctgcctccgtagttgaacccgattcctgaggcaatgatatggcaggtccctcaactctccatctatagcacttgccttgcctggcctgggaaccggctctttcactgctgtactgcatggaacagagtaggcactgcttaaacctatcagctgcctggctctctcaaatgctctttccaggaactctggcactgtgaacccactgctgaatctcgtggctcataaataaactctcaagtgataattgtgacttgaattctctagttcttacctgaccacctcttaatatcatcctggaactgtctttatatcatcttggaaaccctggagctgatttgaaatacctctggtcagttcctcagcatcagttctgtctaatgaacacctatattcttcattgtctcctcactcttggctctaagttgtcacaagtagatgattatgtctcattcccaagtagagataggacacatgagagtgggtgggtgtgcccatagtttagacaggactatctttgtgtggtaccagctgcggcaggatctacagatgactcacacatgttaatacccacatcttctgagtggccaacatcctcagatttgcatgtgggcatttgcaagaggaagcacacagatgctgtgatcagggctgagatgcctacaggtgtgtctgctgggctgcggcaggtggtggccagtggaagacaggttgtaggtagggaaagtgttgcctcatggagggtgatcctgatatggtgggaacttcaatccagactccgacatcgccacgggcaagctgaatgacagtaaacaaccttcagggcttggggacgtcagcacactcacctgtggagagccagccagaagacaggcagtggcacaagttttctgaggtagagattgtgactgtaggtgaccaaggaacaaaatattatgaagaccacattggggttcataggctggtggccctgtaggacacttggacacattttttttcctgccaacaccaaagaataatttctaggtgtctcttcttcacaccttcccatgaagcttgaaagttctagagctcactagaaactagaaaaattttccttactatgacagcaagtgtgcttcgagaaaactcacttgctgacctttgttccacagcccagcaggttgccacctgatttataaaaacagattatggagacagtccagaaaaattactccctctttcttttttttttaaagtaatattttaaaattcctttctttttgaagtatttgggttgtttttatcaatttcgttcactgttgccttaaatgacaattcttgcctccctgaagaactcttggccttcattcctgccactacagtgagaagttctaagctggaagggccatcccagggatgactgctttaagcagccagtcatgtagggttgcgcctgtggccctggcagattggaccctgtttctaccaagtggtggcatcacttggcttccatgtagtgtttttctgttctcctgcagatcgctgtcagccactggaggcctcacccactgggttccagacagctgccacttctgtttagaagcaacactgccagtgagaaaccctgccacacacaacacacacagacacacacacacagactcacacacagagacacacacacacagacacacacacacagacacacacacacacaccacacacacacacacacacacacacatgtgagaggagggccaccctgggaggaaaccctgaattctcccctcttagcacactccttctatctactccttctatctcctggtagagggagaagctgtgtgcccctattactacctctctttacctcctcattaagggctttggtgcgattattgtctcccttttaatctcactacttgcatgcagctttcttgagaaaggttataatttaatcctgaaatacaacttctaggagttttctttttaattcatcattccaagtaggtgtctttgtctgtttccacattagaaaatgaaaccaatacttaaatatgatttccctgcttttattggcagctatttaagatctatgtctgaggtctggctccgtgtggtttggaatactttattgttattattattattattttgagatggagtcttgctctgtctcccaggctagagtgcagtggtgtgatctcagcccactgcaacctctgcctccctggttcaagtgattcccatgcctcaccctcctgaatagctgggattacaggcacacgccaccacgcctggctaatttttgtagttttagtagagatggagtcttaccatgttggccaggctggtctcgaactcctgacctcaggtgatccacccgcctcagcttcctaaagtgctgggattataggcatgagccattgcgcccagcctggaatattttctaagctctttgatgatggcggcttcgatttaactctctctgacttaattctgttgattataatgtcattcaatcccattagtatactcatatggaaacaaaggcatgatttcagattttatttatatcttcatgctttggaaaaacaatttcatgagaaatcactcagcccatgaagtaccatccttgacattacttttttgggtttgcttgtttttaaaacagtttttattggcttttgctttttataattttttgaaccataccaacagtcgcataatgagtatttttagacatgtgcttttaaaatcatgtgaaaattcttttaatgtcaacatgaagagttttgtttataatcattgctgtgatcaagaactgaggtagaatttcctagctggacacaaatgggttaaaaaaaaaacccgacatgctctttgattattggataagttgtattctaaacaatattactctgatgaagatattaaggggagttaattagattgtgagactcttgaggacagttgatgcctttttcatttttgcattcttcttgggtgccgtgtagttgatcagtatagtcatgggacttagttctgattgtagggagctgtgtgaactgcatgaagcagacgagactccatcctcgcatgggaaacctttaaggattttgaagctgggcaggtgcaggttaatagaaagatcactctgggctctgtaggagagtgatttggagagaagagcccctagaggcccagggaacattgcaggtggctctgccaggagaccaggtagaagatgtggtgagggtgggcgggagatggatgaaactgtggatttcgtaggtacagattcatcatccttcatctgtagctacactattgaagaagacctccgaaaaccagaaggtgttttatttgtagttcatttggcaagaaaacttgagtttgacctgaactcatttggtgttgaagcctgacttgaacagctgggactcttttaaagtccttatgtatgtcaggcatccttcataaacatatgtatttactgcagggctattaatgtgtttgattaggggaaattgccctggatcttgctgttttttgttttcactgtaatatatgacttgtgctatataacttttctcaaatgggaagagttctggttcagcagcacctctggccctagggttttggaaaagaggttgtgaaactctttgacatgtgtttacaggataaggt

SEQ ID NO: 222 - DNA, 4053 bp, Homo sapiens
ttttttttcctttttgctgccactttcttacttaaaagaataaaaatcaaagccaaattcatcatagtaatcataataatggcaacaacaacaaaaaaaggagtaaaatagagttgtgaatgtttgctttgttattaaacatatcaactcattggagctgatttatataaagttaaatcctgctagaatagctggattccttcctacatgggtggggtgggaatgctgagatcctggtgtgggcattccatgccagggtagaaatttcctgctcaggcacttagtgaaggagccaactgagggaggataggtgatgtgcccgcccatccggtggcacccagtgacctgtgcacaccaccccccatctgcccaggacccagccatgttgttcattgtacccttttcagactgctgacctccaggagcacttgtcttaaagtcacatagctgtatttttcctctccagaaaaattttgaatgtattttctaaatagctgaggtcattgcatggtcttcagtgaacttagctacaagtgaatgtgacctggagtgacccagagtgagtgctggccagcataggtttcacattttctgtgtgaaagttcttcttttgttgtttgtgattaataactggatgggatataaagccaaatgatttcattgttgaacacagacttgaaggtcatgagaaactgcctgttcaaattacactttgccaagacatggaaaaaggtctgcatcaacacctgaatagttttagaaatacggtagagaaggaaaaaaatgacatgccacttgttatgtgatgtgaaagttgatttccacgcgatgcaatatcttgggtccttacaacatctgacctatgaggctgatgagtttgcactgagtcaggactttaaaacaaaggtgtattgaggacctactgtgtgccaggtcatttagaatgagtttttatgctaagtaatgtgttatatttatgcttattttgttaagtgctcagtttctcttaggttttgtattatgtgggtttgctattttttaaaaaaatatttttaattttttgggtatggtttgctatttgaaatatgattttgaataagtttctcagtacatagcacttttaattttatgtttttaaaagattttttaatggttatacataataattgatggacacacaatagtatttaaatctaaaaatagagaaaccatggcacacaaaacacagtatcttacagaactgtattatttgcttcttttctatgtgttttctaggcttttgagtcagatgttaggaaagagtctgtccatctttaattttctcacttcgagaagcactgaaatatttctatacatatgtccattggtatagcgacctaacacaactttaaaatcattttgaaattgacgcacagagagcttggttttccagaactggtgaggtgtaagatggttgaggactgacttggcctggtcggacctgtttctttgtagcattattactatttgtttattttccacctgggccttacatcttccctctcaagacagcgtctaggtcccaactcagttggtaggaatttgtgcagtagcaaacctgcagatgggcagagatacaaactcactcaactcacattacagtctttccctgtctaaaacaaacaagaaaacaaaacaaaaaagggagagatcatataggcgtgtatatatacaatattttgttatagataaggaacaaagtaccatatgaattcaaaaggtgagggtgggatgggtttagagctgggagagaaaccatctaaagccttcatgaaagggggtaccatttgctgtggatactgatggcaatgttggggctggaggaaaatgttccaggtagagggcacagaattaatagggggtagctataaaaagcatgctgaataccatgctaggtaggcatttagccctgtagcatatagatgtatctgaatttaaaggcagtgggtgatgttcggaggtttggagcataagatattttgtgatcagaagaaggtgaatctgtcagaggtgtttaggaagcaaatacaagggtagatagtatgggaggttattgtagtaccttgagagaatgctattgaggacctggatgttgaggttggtagcctgggaatatctgggctctgttgatgaattaaattgagttatggcaaagctctcttcgtggatttcaatatttgcgattccactgcttaaagctgagctcactcttcttttcggtgtaactgtgatggaaggaacttgcgtgtgagagtctccctcttgttgggtctgtgctattggtttgttgattaggaactcaattggtacctgcagaaattgcctctgattgggacctgcttctccccactgtctcccttatgtttccccctgagaggtaaaaggagtgatttgggtcaaatgtcctttgttttgggttggtttgtgtgggatgactcctggtgtagattttgtgtgtgggtgctaatgtacttatagccagctggggctagaagctcaggcacccacagctttgctctccccacttcgcgtttttacttctgattttctgtttcccaatttgtgattcacaggcagggatgactgactgagaagcgttgcagatgagtccgtgtatttgtttcattttgtgattgtttcaaattagcacaaatttgatggcttaaaacaacacaactttactatcttacatttctgaaggttagaagtctgacacgggtcttactgagctaaaatgaaggtgttgacagggccatgttccttctggaagctccagaggagactcctttccctggtcttttccagcctccacaggctgcccatgtttcttggctcatggctctctttagtcttcaaaaccaacagtggtgggctgagtccttctcatgtggctcgttgctcgctctgctattcaactctcttccttttccacttagaaggccccttgtgatttcactgggcacaccaggctaacccaagataaccttctatcctaaagtcagttgattagcaaacaatactttcatctgcaacctcaatttaccccttgctgtgtaacctaaggtactcacaggacatgggcctcttttgcaagtggagaggaagaagatgtattattctgcttgccacattgcgtagctcttgattttcacttcttttaaaaaagaacatctgcagaaagaattgagagtggtggataattctccaatcattcctgctttctcctgaaataaatttcatgcctttcttttagcagttgatttaataattaattttaaaaataatgttagaagaagcttttcctgttcatgtgtgtgttatgatgcatatgtttgtctgatgaaggggaaaaagggaaggaatgactcaagtactttcaactttagggccagcctaggattggaattctggagtagatcatgaggaggagatggtcaactttcttgtgacaaaagcatgtacataaaccacttaggattctccacttttcacattttattctgaaattgcatgcttcagttaatgtgatttaatggttttctctcagtgtcattggcaggattgttactaagcgacaaacattcaccacagtgttcaaatgtacttgggaagaaaatgagtagccaaactaaaagtgggatttaaataactccaattttatgaaaagtgaagaagttcagagattacttaaggtatttttttggtgatctgtggattcaatgatcatttcgttcatggaaggaagttttatttttatttttttctgagactgagtcttgctctgtcacccaggctggagtgcagtggcgtgatctcggctcactgcaacctccgcctcctgggttcaagtgattctcctgcttcggcctcctgcatagctgggactgcaggcatgtgtcatcacgcctggctaatttttgtatttttagtagagactgggtttcgccatgttggccaggctagtcttgaactcctgacctcaggtgttccacccgtctcggcctcccaaagtgc

SEQ ID NO: 223 - DNA, 4024 bp, Homo sapiens
acacccactgtgactatttacaatgtttgcatctcagcaaaaataccatttgtattctgaattcctttgtttcaactacataactcaataagaaagaaagtttcctacaattgaaaagaatagacagtgtttaaaggccaagttttgccttccttttaaggctgaatgtgctttattttaagccactcttcctcctcaagttaagaagggccttctggtatttctgtgcaaagcaccagtaatactgtttctttttaagttaatcatttttaatcctgcttattttatttagtgcctattgctatagcatctaatgagctcagcgcttctgacagtatgtcctatggatgcctgggggcagattgcctgggttggactctgctccagttcttattagttgtgtatgtcagctctgttttcccatctgttaaatgggatagtaatagccacaataatacctcatggctgttgtgaggattaaaataagaaaatgcaagtgaaagacagtccagaggatgggagaaaatatttgcaaattaggtatctgctaaaggtctagtatccgcaatagataaagaagtctttttattttttattttatttttttttgagatggagtcttgctttgtcacccagactggagtgcagtggtgtgatctcggctcactgcaacctctgcctcccaggttcaagcgattctcctccctcaacctcccaagtagctggtattacaggcatgcaccaccatgcctggctaattttggctaatttttctatttttgtagagacgtgtttcagcatgttggcccggctggtcttgaactctggacctcaggtgatatgctcaccttagcctcttaaagtgctgagattataggcgtgagtcatcatgtccagccaagaattcttataactcaacaatctaaagacaacccaattgaaaaatgagcaaaggaatagatatttctccagaaaagataaacaattggctaataattattgcccatgaaaagatggtcaacatcattagtcacttagggaaatgcaaatcaaaaccatagcgaaatttttctactttgtgcccactggtatggctgtaataaaaatggaaagaaatacgtgttggcaaggatgtgggaaaattagaaccttatattgcttgtgaaaatgtaaaatagtgtagcagttttggaaaatattttggcagttctacaaaaagttaagctttgagttatcatataactcagtaatttctctctaagttttctgcccaagaaaactgaaaacatatgttcacacaaaaacttgtacatggatattcataacagcattattcataataggcaaaaagtggaaacaaccaaaatgcccatcagccgacgaatggatcaacaaaatatggtcatttcatataatggagtattattcagccatacaggaaatacaggactgatacaagctgcaacatgcatgggccttgaaaacataatgctaagtgaaagacgtctggcacaaaaggtgacatatcctatgattccatttatatgaaatgtctgccactggaaaatccataaagagagaaagtaggctagtggtttattagggctcagaggctggcagggaatgggggagtaactgctaatgggtttctttctggggtgatgaaagtgtctggaattaagattggatgattgtcgcacaactttgtgcatacagtaaaaaaccacagaatcgtacatccgttaaatccggatggattttatggcgtgtgaattacatcccaatgacaaaaaataggataatagctgggaggtggtaccatgcccctaacatggtaagcactctatgtgttagttatttctgctgctgctgtcatcattttcattgttactacaaaatcaattccattcattattcctaaaaatatcaatttcttatggttatattatttctagttcttttcttcaaattacacaaatattagccactcagtgcttgcagaatattttcaaaggtctgcatttgtgaacaggtcctgggatggagagcctttgaattaccgtgggtgtatgtgttatccatttgcttacactgcatcttcttactataaaataaagtacttcttggcagatcatatggcatttatagatttttcttcttactttcttttatttgatttatataattgggtactctcaactcccgtgatggagagaaagcaaagaaaccaagaataggataacgctatggaatgcctcaatcttcttttagttttttatttttggttgaataattttagtttagttcatggaataaggtaaatattttacatttgttaataactccatactttgttctaggttcagtggcttacaaaaatatgtataacaaaacaaaattaaaaaatgaatcagtagagacaaaaagagcatggatgttaaaatgtaactaaaagatgccctgcacggtggctcactcctgtaatcccagcactttgggaggccaaggcgggcggataacttgaggtcaggagtttgagaccagcctggccaatatggtgaaaccccatctctactaaaaacacaattttttttttttttaggtggagtctcactctgtcaccaggctggagtgcagtggcgtgatctcggctcattgcaacctccgcctcccgggctcaagtgattctcttgcctcagctcccagagtagctgggactgcaggcacgtgccaccacacccagctaatttttgtatttttagtagagatgaggtttcaccatgttggtcaggctggtcttaatctcctgacctcgggatccgcccgcccctgcctcccaaagtgctgggattacagttgtgagctaccgcgcccagccttaaaaatacaaaaattaactgggtgtggtggcctgcgcctgtaatcccaggtacttgggtgactgaggcaggagaatcacttgaacctgggaggcggaggttgcagtgagctgagattgtgcctctgcactccagcctgggtgacagagtgagactccatctcaaaaaaaaaaaaaaaaaaagtaactaaaaggaaatacttaaaaaatactggaattcctcaatcttgatgaactatcctttccatgttttctcccatagttaaacaaggagtttttacttcttttgggcagtagctacatagtatgagacttctagtagtgcactatgctaacatcatcacacttgaatgttttttgaaaatattttacgtaaaatacatgtcccagatggactctattctttagttggttatctagaattaacatttggattatgtttgctaaatgcgtcagccatatcctaagcgctgtgatccttttagaactattaacagatgagactggggggcattttatggttataagagctaaatgatatttatgcaagtgtgtaaacattaataactcagcgtttataagcatgttagaatatttgattatggctagggaaatgcatattagctatctagcacagatctaaaagtgatctgggctatacctttcatttctggatttctttccttaagcttaaagggtgttctaatttcattattatcaatctcaagatcatttcacagtttcctggtggttgggtgtcatggtgactttttgttttccaggctctttgtttggatatgtggccttgtttgagttgtctttgattgctatatatctgtacccttgtttgcttttgcctggctactgattctcagtgtttcactttgacctttgataaagctgtgactctgattcatttttaggggggattcacctcgttggtggaatctagccttgccctgccaggcggctgcctgggtgttgcttgctggttggaatgtatccattgaaggccttagatgttggagtccttgcttcctagctccacctctttgtttcagggcaccactcttctggtctagtgcacagcctggtctctgtcaatcagcacgttctgcctggcgttttatggcatgttttcttccc

SEQ ID NO: 224 - DNA, 4029 bp, Homo sapiens
atccgccctcctcggcctcccaaagtgctgggattataggtgtgagctaccatgcccaggcttcccagtgtcattctgatttgaatttttctagaaagatttctagaatttttctagaatgattattgtatcctaaacatttatagcattatgttctttactttttattgcttagaaaaaaatagtttagttactactggtaatttgcaaattaaagaattatgtataaaattgctataggtgcctgtggttaaattcttttaccaagatttcacttctagagaactgaagaatttaccaaagtaaaaatggtctaactttattacttggtttatagaaatgaataaatcatagttaatagtacagtatattaataatactgtgctctaagctacagattagaaaaatatgcaccctgtttgtcacaataaatggagtgaccaaagctatagtatttcaaatctgtgactattatatatttttctataccaagtcacttctttttttgtttgtttgtttttgggacagagtcttgctctgtcacccaggctggagtgcaatggtgtgatctcagctcactgcaacctctaccttctgggttcaagtgattctcgtgcctcagcctccccagtagctgagattacaagcgtgcaccaccacacctggctaatttttgtatttcaatagagaaagggtttcatcatgttggccaggctggtcttgacctcctggcctcaagtgatctacctgcctcagcctcccaaagtgctgggattacaggtgtgagccacggtgcccggcctgtaccaagtaacatttctttctgtgtgcaggaatatacatgtgcttgttacagagttgagtttatcatattctatcaccatgtatttcccataaatctattaagttaaaatctgtgccacttatcaaagtttggagtgattacatatatatacataaccctatatgatctttgaattcagagccttgatgctagcctgagagtctgtgtgtatgaatgcaggtggcaagagtgaggcatggattgttgctattttttctaccggagtgccattattaacagtttcttttctgtatagtcactgtgaacactgttgtggggctgctccctgtgtgtggctctgcctcagaacccacagagtcggctggctcccagacctactctgtctctggttacaagtcagtgtcttatttactggaagttaaaagacagggcactgttgatttacactgtgcttcagcatgcccttattagtatttcttggttcttccatcagtgagtctctgatttcttcaccaaaaaataatcttgcagagagtcatgatcaaccctgtttttataaaacactgagctttggaaagggaaatgattactcatcacaactctaaacactaggataaaatgttcccatttagatcaatcaggggccaatttaattttctaatgaactttagaattgcttttgtggtctgcctttagggactattattataccagcttttcttctttttaatgtttctagaagtcaattttcatctttgccaagaattaaaggatccttaaacatgtggaaaagatgagaaaaacagtcagtggatcatcttgatgatgatggtcttgcaattttgcagaaggttgaaaaggcaatacatataacagattcatgttctttctattgaaatggacaagttagaggtctagattgaatacactctgtgtttagacttaataaacactttcaataagcttattcaatattttttaaattgacaacctgtattgggaactgcatatactatagagatcaaagttgacatttcttgccctcttgggcttacccaaaacaatatgtaatcaaattaagataagtactgggtgcacaaggaaggaaaacaggttgcctttagagactggaggagtcgtccagaagtccgctctgaagagaagatgtttaaaattaaacctgcaatgttcgtctgaattaagcaggttgagaacagggtgaaggaggcaggcatagcagcatgaaccaatatcccgaggcaggaaagggctgggtttgtcagagtaacatgaaggtcagtgtgctggagcaaactgaggagggtgagtgtttcaagacaaggcttggcataggagtggtcagatgattcagggccatatgaaccatgttaatttagttgttccaaagttcagagagttgattagaaggaataagaagagaatttaggagacagtgtcagaaggttattggctttaggctggaggcaagagatgacagtagcttggactgggggttgacagtggaactgaagagatgtggatggactcaagctgtatttaggaattagaaccaacaaaagttgatagaagggttagattgtggtattagaagaaaggattcatttcagcatcctggcatgaaccagtgaatggatgaaagtgcttttccgtagttgggaaagactagaggcagaatagatttgagagagaagcaacagttcagttttttgatgggttaaggttgaaatgagtctgtgagctatctcagtggagatgtcaagtaggtggttagttacatagtatgtgtttatctcttgctgcataataaattattatgaaacttagcagcaaatctatattagttatctattgctctgtaacaagtcaccccaacattggtgctttaaaacagcaaatatttattatctcatgcagtttccttggccaggaattttgaagtggtttagctaggtgattccagtccagggtctgtcatgagattgcactcaagatgctggccagggttgccatcatctgaagcttgaccgaggctagaggatctgattccaagatggcttatgtacatggcttttggcagaaggtctcagttccctgctggttctcggtcgaaggccacagtttctcgccacgtgggcctctctctagggtgcttgagtgtcttcatgacatggctgtgagcttctcttagagtgagagagatatgaaagaatgcaaaggggaagctgtaatacttttagtctcaaaagtccgactcatcacttctgccatattctattcagtagaagtgagtcaccaatttcagcccatactcagtgggtggggaattaagccccccgcttgaatagacagccaccaaataatttctgaatgtattttaaaaccaccacacatgattttgtaattgagaagaaaggtttgggctggaaataagacattaggagttttgcacatagatgctgtggagtgagtagatgcgtgaccacttagtaaaagtgtgaagaggtccaagactgatcctttaggaaatctaacttgtagaggatctgctgtggaggagtggaggagaaggaagaaatggaatctgggaagatgagaagaatttttcaggcagggagtgttctattctgtggaagcctactggaatgtgtatttgactttcatttttaagaatttattctctgaatgaatgaagaatgaataaataaatgtcatgtatatgttcaaaattttaattctaagtatgattgttattgaaatgcttataaaattaagaatggaaatcagcattaggaatgcataataacagagtgggagatattggtaaaaaattatttaatgtccagacaataaaatacctatgaagctttaaaatgacattattaaagaatgtgcactgtaataaaaacagatttataaagtattttaaataaatataaaatactatgtaaggaagaagcagacaaaaatgtctaggaggatgtatataaacctgttaatactggttatctctgggcagagggaaaatgggtggtttaagtttccttcctttggtttgtctaaatcttccttaataaatggaaattgcttttgtaataaaatgtttgaaaatatcccctcccaaaataaagaaaaataatgaaaataatgatagttgaaactcaattgaggggcccggcatattggctcatgcctgcaatcccagc

SEQ ID NO: 225 - DNA, 4355 bp, Homo sapiens
ccctgctttatgcctggtccccaaagtgagcagaagtgaggcaccttgccctctaaagcaattcctttctttttttctttctttttttttttcatttgaaggatttcttttttaaacttttattttaagttaaggggtacatgtgtaggtttgtttcatgggtaaatgtgtgtcacaggatgggggtttgtttacggattatttcatcatccaggtattaagcctagtatccattagttatttttcgtgatcgtttccctccccccaacctccaccctccaatagaccccagtgtatattgttccctgctatatatccatgtgttgtcatcatttagctcccacttaaaagtgagaaatgtggtatttggctttctgttcatatgttaatttgctaaggataatggcctccagctccatccatgtccctgcaaacaacatgatctcattccattttatggctgcatagtattccatagtgtgtatatgccacattttctttatccaatccaccactaatgggcatttaggttgattcaaagtctttgttactgtgctgcaatgtctttgtaacagagcaatttatattcctttgggtgtataccctgatatggcttgtctgtgtctccacccaaatctcatcttgaattcccaggtattatgggagggacccagtgggagtaattgaatcatggaggcaagtctttcccatgctgttcttgtgatagtgaataagtctcacgagaactgatggttttataaagaggcgtttccctgcacaagctctctctttgcctgctgccatccatgtaagatgtgacttgctcctccttgccttccaccatgattgtgaggcttccccagccacatggaactgtaagtccattaaatctctttctttggtaaattgcccagtcttgggtatatgtttatcagcagtgtgaaagcagactaatacatactcagtaatgggattgctgggtcaaatagtatttctgtctttaggtctttgaggaattgctatgttgtcttccacagtgtttgaactaatttacactcccaccaacagtgtgtaagtgttcctttttttcttcaacctcgctagcatcttttattttttgcctttttaataatagccattctgactggtgtgaaatttatatcattgtgtttttggttggcatttctctaatgatagtgatgttgagctttttttaatatgcttggccacatgtatgtcttcttttatttaaagcaatttcacataagctacagcgatgttcttaagtcttgggaaaacagagggcatactttaaaatgtaggttctgtgaaggcagttgtgcaggcacagggtagattcctatatgtggcttaggtaagctttgtgatgatttggtataacaaagtggtaaagtttttattatcttgagaatacagcagttggtattcccttagaccagattccttcacatctctggatgactgggctgcacctgattccttaagcctggctggagtcaaggagtctgtattctaagacaattctccaggggattctgatgttttgctacatctgggaatttgtgcagtgtactattctttttgaccatgatgacagttgggttttattgagaattaaccatgtggctcttgccgcatgctgattattatctttaattctcataacaattgtttaagggttgcatttttaccctctttgtatataggagaaaaataaattgttcaagacataaagcagtcaaaaagcagttccataaagtagttgggagctgagttttaccttataaggctgttgggatcaaatgagataatgtgtacaaagtggttagccctgtgtctggcacatagaaagtgtttaataaatgtcagttttattatgagaaaacatgattcatggatggagactctgatagcatccttagtgcatgcatctccctattccagtcatctgtccttcagtgttacgttttagatcagagttataggacatgtcaggcttattttatcttattttcttttatgagacaggttctcactctgtctcccaggctaaagtgcagtggtgtgatcatggctcactgcagcctcgaactcttgggttcaagtgatcctcccaccccaccctcccaagtagctgggaccacaggcatatgccaccacacccagctaatttttgtactttttgtagagacagggttttaccattttgcccaggctggtctcgaactcctgggctcaagtgatccactcgccttagcctcccaaagtgttgggattacagacatgagtcattgcgcccaggccatttcagcctgtttaacattccttttgcagagctggaacatccaactccaacttgtagaccagaaatactcctgaatttctttcctcagacttatctcagtggcaccagattgagttaggattgagtttagctgcaagtaagagaaacccttttacgatagattaactaagaaagaactcatttttctcaagtaagcttcagtctgtaggtaggcaacccagggctggttacctgctcagggaaactggcagcttctgtcttcctggaggaagcagaaaggcccagggcaagatgttcatgccagccaagtctgttaatttttatcagggaaataatagttctcctgggtcttccacccaatatacttctcccctcctctgggcggaattgagccaaatggttatctctagttgcaaggcaaggtgaatattttaactggccaccttgctacagggaaaaaaaatgggattaatcttgtaagtgagaaggagagaaaggatgcttgagtaggcaactagcagtgtgtaccatagtgagttccagcaaatagttctatcttaaataccatgtctagaggcatgatcagagtgaaaacaattctgattctagaattcaggttacctgtaattatattctgaaagaatgataggttgaaaatatgagtattaaaagacaaaattggaaccaagtacaatttctccatttgtcttataggggaatatatgaaaagttgagataaattaatctcttttcttcaaaaaaataacactgtgaaatgaacatgaaaaatgtttattgcatctggtttttttcctctatgttttatttcagtaaaatacagataacataaaatttattattttagccatttgaaatgtacatacatcttgttatataaccatcactaccatcgttctcctgaattcttttcttgttgaaaaactgaaaatatatacccattaaaccaggggtccccaagccctgggccacaggtcgctactagtctgttgcctgttaggaggcgagtcacacagcagggggtgagcggtgggtaatcgagcattacctcctgagctctgcctcctgtcagatcagcagcggcattcgattctcataggagcacgaaccctattgtggactgtgcatgtgagggatgtaggtcgtacactccttattagaatctaactaatgcctgatgatctgtggtgaaacagtttcatcccgaaaccactcccccactgcctcccccactgccccgcccatggaaaaattgtctttcacaaaaccggttcctttttggtgccaaaaaggttagggaccgccacattaaacaacaactcctcactcctctctcctcctagcccttggcaaccaccattttactttcactattctaggtacctcatgtaagtggaatcataccatagttttctttatgtgactggctgtgtcacttagcacactgtcctccatgttcatccatgttgtagcatgtgtctgaatttcctttctcttcaaggctggttattattccattttatgtaaatatcacattttgctaattaattgatctgtttgtggacacttgggttgcttccatcttttagcttttgtgaatagcgttcctattaacatggatgtacaaatatctctgagattctgctttcagttcttctggttatatcattgcatatgctttttactcagatcccgtttctccttgacataaccctaggtaatggtagttagcttactcttatcttgagggaaatgctaaagttttgaggaaagatcattcatccaaatctttttgtttgattgactcttgctaacctccaagaaaaatttgtgatcacgagttatattttatacagtccataggttcagggaagggagtaattctagtgttcctaaaagatgccattgcagtgctgtaatgcagaaaaacgctaggttttggggtgtccttaggaaggagacaagaaagaaaacagagaacgttatccttcctttgcaaagccatgttgac

SEQ ID NO: 226 - DNA, 4033 bp, Homo sapiens
tcgccttagcctcccaaagtgttgggattacagacatgagtcattgcgcccaggccatttcagcctgtttaacattccttttgcagagctggaacatccaactccaacttgtagaccagaaatactcctgaatttctttcctcagacttatctcagtggcaccagattgagttaggattgagtttagctgcaagtaagagaaacccttttacgatagattaactaagaaagaactcatttttctcaagtaagcttcagtctgtaggtaggcaacccagggctggttacctgctcagggaaactggcagcttctgtcttcctggaggaagcagaaaggcccagggcaagatgttcatgccagccaagtctgttaatttttatcagggaaataatagttctcctgggtcttccacccaatatacttctcccctcctctgggcggaattgagccaaatggttatctctagttgcaaggcaaggtgaatattttaactggccaccttgctacagggaaaaaaaatgggattaatcttgtaagtgagaaggagagaaaggatgcttgagtaggcaactagcagtgtgtaccatagtgagttccagcaaatagttctatcttaaataccatgtctagaggcatgatcagagtgaaaacaattctgattctagaattcaggttacctgtaattatattctgaaagaatgataggttgaaaatatgagtattaaaagacaaaattggaaccaagtacaatttctccatttgtcttataggggaatatatgaaaagttgagataaattaatctcttttcttcaaaaaaataacactgtgaaatgaacatgaaaaatgtttattgcatctggtttttttcctctatgttttatttcagtaaaatacagataacataaaatttattattttagccatttgaaatgtacatacatcttgttatataaccatcactaccatcgttctcctgaattcttttcttgttgaaaaactgaaaatatatacccattaaaccaggggtccccaagccctgggccacaggtcgctactagtctgttgcctgttaggaggcgagtcacacagcagggggtgagcggtgggtaatcgagcattacctcctgagctctgcctcctgtcagatcagcagcggcattcgattctcataggagcacgaaccctattgtggactgtgcatgtgagggatgtaggtcgtacactccttattagaatctaactaatgcctgatgatctgtggtgaaacagtttcatcccgaaaccactcccccactgcctcccccactgccccgcccatggaaaaattgtctttcacaaaaccggttcctttttggtgccaaaaaggttagggaccgccacattaaacaacaactcctcactcctctctcctcctagcccttggcaaccaccattttactttcactattctaggtacctcatgtaagtggaatcataccatagttttctttatgtgactggctgtgtcacttagcacactgtcctccatgttcatccatgttgtagcatgtgtctgaatttcctttctcttcaaggctggttattattccattttatgtaaatatcacattttgctaattaattgatctgtttgtggacacttgggttgcttccatcttttagcttttgtgaatagcgttcctattaacatggatgtacaaatatctctgagattctgctttcagttcttctggttatatcattgcatatgctttttactcagatcccgtttctccttgacataaccctaggtaatggtagttagcttactcttatcttgagggaaatgctaaagttttgaggaaagatcattcatccaaatctttttgtttgattgactcttgctaacctccaagaaaaatttgtgatcacgagttatattttatacagtccataggttcagggaagggagtaattctagtgttcctaaaagatgccattgcagtgctgtaatgcagaaaaacgctaggttttggggtgtccttaggaaggagacaagaaagaaaacagagaacgttatccttcctttgcaaagccatgttgactgtgcacatggattacgatctgagattctggtctcctacttaaatgatttaacagtggaaggtattctagtgaaggaaacccaagtcccggagcgaatgcatttgttacttttgtaaaactgactaaggtgatcagtactcttcagtctaaaaatatgaaagtggaaagaagacatacttaccagctataagcttatttcagaaaagcaaacataaacttattcttctaaccttcaacagttatctggactttttgatgcttaaaagaccagcaaatgttcaagacaaatgagaggaagagctattttacactgaagatataattagcaagtttgcagtacccagtgatagtatagactgaatttacaaattttttcttttaaaggcaataaatgtcagactcacagtagactattaaataaagacagtgctgccagaactctatttttttttttttttcttttgagacggagtcttgctctttcgctcaggcttgagtgcagaggtgcgatctcggctcagtgcaacctccgcctcttaagttcaagtgattctcctgcctcaacctcctgagtagctgggattacaagcgcacaccaccacacctggctaatttttgtatttttagtagagacaaggtttcatcatgttgaccaggctggtcttgaacttttgacttcagatgatccacctgcctcagcctcccaaagtgctgggattataggcatgagccactgtccccggcccagaaccctaatttttaacagtgacaagaagttaacatgaaggaagtcattaggaaagtgagtggcctgtaaatgaagtttcttgcgcttttgctcaggcaatggattttatctgtccccctcatccaaccctacctgaatgagctttttaattaaaaaattcattagtaaggctgggagcagtggttcatgcttgttatcccagcactttgtgtggtgtaggcgggcggactgcttgagccccggagttcgagaccagccagggcaacatggcgaaacctcgtgtctacagaaaaatacaaaaattagccaggcatgttggcacatgccctccaggtacctgggaggcagaggtgggagaatcgcttgagcctcggaagttgaaggctgcagtgagccgtgatcatactactgcactcaagcctaggtgacagagtgagactctgtctcaaacaaacaaacaaaaagtattagtagtttatgtgaaccttttcatagttatgaaaattaaaaataagaatatgtatttttcaatatgagactaaacctttcaattattttatttattaacttccaatttatacccttttaggcaaagagttctgtgatttatgggccaatttttaaactgtgatgtccatgggaagaaatttttagccctgagttttgaaggggaatgcagtgttcctttctgacttgtttttcctgcttattataaatatttatcttggacaaaggattgcattttagcggatgtgcaattttacaaatttaattattaaaatgactcttcttcctttttttatgatcttacattttgtttttaacttgtcatggcggatattaaaacactccaaataaagacaaaaaaactcaatataaaaaaaaaccaaaaaccacttccgaaatactccattttttcttatttaaaaaaatgctatttatagtagtagttggcatttcatcaaagtacataagcaaaggacagatactcctcattttttcccaggtttctattctttttctgaaagtgagtaaaatattaggctttggagaaagtctaggtagtttggtgtgatctgttggtagcattttgttttgccttaatcttctatttttttcttcccattttatttatttatttttttgagatggaggctcattcactttgtcgcccaggctggagtgcagcggcgcgatc

SEQ ID NO: 227 - DNA, 4050 bp, Homo sapiens
ggcaagatgttcatgccagccaagtctgttaatttttatcagggaaataatagttctcctgggtcttccacccaatatacttctcccctcctctgggcggaattgagccaaatggttatctctagttgcaaggcaaggtgaatattttaactggccaccttgctacagggaaaaaaaatgggattaatcttgtaagtgagaaggagagaaaggatgcttgagtaggcaactagcagtgtgtaccatagtgagttccagcaaatagttctatcttaaataccatgtctagaggcatgatcagagtgaaaacaattctgattctagaattcaggttacctgtaattatattctgaaagaatgataggttgaaaatatgagtattaaaagacaaaattggaaccaagtacaatttctccatttgtcttataggggaatatatgaaaagttgagataaattaatctcttttcttcaaaaaaataacactgtgaaatgaacatgaaaaatgtttattgcatctggtttttttcctctatgttttatttcagtaaaatacagataacataaaatttattattttagccatttgaaatgtacatacatcttgttatataaccatcactaccatcgttctcctgaattcttttcttgttgaaaaactgaaaatatatacccattaaaccaggggtccccaagccctgggccacaggtcgctactagtctgttgcctgttaggaggcgagtcacacagcagggggtgagcggtgggtaatcgagcattacctcctgagctctgcctcctgtcagatcagcagcggcattcgattctcataggagcacgaaccctattgtggactgtgcatgtgagggatgtaggtcgtacactccttattagaatctaactaatgcctgatgatctgtggtgaaacagtttcatcccgaaaccactcccccactgcctcccccactgccccgcccatggaaaaattgtctttcacaaaaccggttcctttttggtgccaaaaaggttagggaccgccacattaaacaacaactcctcactcctctctcctcctagcccttggcaaccaccattttactttcactattctaggtacctcatgtaagtggaatcataccatagttttctttatgtgactggctgtgtcacttagcacactgtcctccatgttcatccatgttgtagcatgtgtctgaatttcctttctcttcaaggctggttattattccattttatgtaaatatcacattttgctaattaattgatctgtttgtggacacttgggttgcttccatcttttagcttttgtgaatagcgttcctattaacatggatgtacaaatatctctgagattctgctttcagttcttctggttatatcattgcatatgctttttactcagatcccgtttctccttgacataaccctaggtaatggtagttagcttactcttatcttgagggaaatgctaaagttttgaggaaagatcattcatccaaatctttttgtttgattgactcttgctaacctccaagaaaaatttgtgatcacgagttatattttatacagtccataggttcagggaagggagtaattctagtgttcctaaaagatgccattgcagtgctgtaatgcagaaaaacgctaggttttggggtgtccttaggaaggagacaagaaagaaaacagagaacgttatccttcctttgcaaagccatgttgactgtgcacatggattacgatctgagattctggtctcctacttaaatgatttaacagtggaaggtattctagtgaaggaaacccaagtcccggagcgaatgcatttgttacttttgtaaaactgactaaggtgatcagtactcttcagtctaaaaatatgaaagtggaaagaagacatacttaccagctataagcttatttcagaaaagcaaacataaacttattcttctaaccttcaacagttatctggactttttgatgcttaaaagaccagcaaatgttcaagacaaatgagaggaagagctattttacactgaagatataattagcaagtttgcagtacccagtgatagtatagactgaatttacaaattttttcttttaaaggcaataaatgtcagactcacagtagactattaaataaagacagtgctgccagaactctatttttttttttttttcttttgagacggagtcttgctctttcgctcaggcttgagtgcagaggtgcgatctcggctcagtgcaacctccgcctcttaagttcaagtgattctcctgcctcaacctcctgagtagctgggattacaagcgcacaccaccacacctggctaatttttgtatttttagtagagacaaggtttcatcatgttgaccaggctggtcttgaacttttgacttcagatgatccacctgcctcagcctcccaaagtgctgggattataggcatgagccactgtccccggcccagaaccctaatttttaacagtgacaagaagttaacatgaaggaagtcattaggaaagtgagtggcctgtaaatgaagtttcttgcgcttttgctcaggcaatggattttatctgtccccctcatccaaccctacctgaatgagctttttaattaaaaaattcattagtaaggctgggagcagtggttcatgcttgttatcccagcactttgtgtggtgtaggcgggcggactgcttgagccccggagttcgagaccagccagggcaacatggcgaaacctcgtgtctacagaaaaatacaaaaattagccaggcatgttggcacatgccctccaggtacctgggaggcagaggtgggagaatcgcttgagcctcggaagttgaaggctgcagtgagccgtgatcatactactgcactcaagcctaggtgacagagtgagactctgtctcaaacaaacaaacaaaaagtattagtagtttatgtgaaccttttcatagttatgaaaattaaaaataagaatatgtatttttcaatatgagactaaacctttcaattattttatttattaacttccaatttatacccttttaggcaaagagttctgtgatttatgggccaatttttaaactgtgatgtccatgggaagaaatttttagccctgagttttgaaggggaatgcagtgttcctttctgacttgtttttcctgcttattataaatatttatcttggacaaaggattgcattttagcggatgtgcaattttacaaatttaattattaaaatgactcttcttcctttttttatgatcttacattttgtttttaacttgtcatggcggatattaaaacactccaaataaagacaaaaaaactcaatataaaaaaaaaccaaaaaccacttccgaaatactccattttttcttatttaaaaaaatgctatttatagtagtagttggcatttcatcaaagtacataagcaaaggacagatactcctcattttttcccaggtttctattctttttctgaaagtgagtaaaatattaggctttggagaaagtctaggtagtttggtgtgatctgttggtagcattttgttttgccttaatcttctatttttttcttcccattttatttatttatttttttgagatggaggctcattcactttgtcgcccaggctggagtgcagcggcgcgatcttggctcactgcaacctccgcctcctgggttcaagagattctcatgtctcagcctcctgagtagtggaaattacaggtacgtgccaccatgcctggctaatttttgtatttttagtagagatggtgtttcaccatattgtccacttcttgaactcctgaccttaagtgatcctcctgccttggcctcccaaagtgctgagattacaggcatgagccaccatgcccggccttcttcccattttaataactaatgattttgccttaaaatacttgaatttattgcaaaaggtgtattttaaatgattcagctccctcttccacggtgtttctgtagtgaatagactggaagctgggaagaa

SEQ ID NO: 228 - DNA, 4055 bp, Homo sapiens
ttatggcaggccaggttattatgaagaagcacccaggagctatgatacatacacagcagtacggagagaaaaagaacagcttgtgagagcatgaagagccagcccctgggatcaagaaaataccaggaatagctcactgccctgcgggcttcttctctcagaagaaatgagactataatggcttcacaggtttgatagccagtgaggtgacacagcatcttgggaagacatggtccacttgtgttattattgcccatcggattcattccccaagcaactagttcattgtaaactaaagcaaaacatatcgttaaaaaaaaaaaatcaacttgtatttagctttttacagagtgaagtgaaactctgttttaaatgcggtttttagctttaataacgtcaaggtttaaatgtggcaaactcacaaaaatatcatttgaaatgttaattatctaaacttcttgtacacttaggtagttttgacaattctgaaaactacatttttaattttggcttttttaaggtcctctgaggatgtcggattttgaaagaaactcagggaggttaaacatttctgtttgagagcagtctgtatcctgttggctttgtttctttgtctacatacatatttataatattttacagattattatataatatttattattcccatttgacattttaataaatattgtttgaataaatgaattagtgtttgggtgtgattgggtgtgatgaaacaagagagcataatggcataactaagtgtgagtggcagaattatattgggagtgattcacatgtagggcccacaaaaagaagaaatgagaatatgatctgaaatgcttttgttacttccaaaataataatctttgctaacgagagattggctttctagggtgtgttaagttttgcatttgtgaaagaggccttaataaaatcaatccaagtttaaaatcatccaataagagatttctttcttggctaaaggtctaggtgctactttcctgaataataagctgcactttagggaactcatgttatgttagtgtcagccaactggacactcttaaattgcttcaaatggtgtactagaggataatgctttctctctaataacagtagagttttagaggtgatttgtgtgctttcataggggaaacaactcctaatttctctgccacatttccagtttaggatttaaattgatatatgttgctacgttctgctaaaacaattttccatacccatttgagctggtgaagtgaaaacattttgaaaccagtttccttgaagatttatcaagcagttttgttgatgtgtcttgctatacttcttttacctatcacagaaataaaatcccaggctaggcagcagtgaaggcctttggatctgtgtgagcatgtcaaaagcattttaagaagagcaaaatatttagaggaagaatttgggaaagcagccttaagggatttaacacatttttcttcttctaattcagtctcgtgttcatccctctaatggagaaaggtcattaatggataagatttgctaagccagcaaaggcttttagaaacaaaatggttttcaaaaatccaagcctaaggaaaacagggtttgaatttgggagcttgaaagaatacatttagagaaggtgtatatgcagtgtaaattatattcattcacttaatattatacatatatatttataatcaagttatagtatgtttgttgcattcttacacatttttgttttggagaagttaaaataacgaattggcttgataatgaagattgaaataatttcagactgtggaagttctgtataaatttctaggcagacaaaatggctgatcagaatagcatgacggagttttagttgtcctgttactcgtctgctatttttacgtgcccgagatctgggccaagattgtttaccttaattgttgtgatgtggaggttagtaagtgtgtgaaatttgttacatttcaatctcataattgaaaagccacaggcaaattcttgttcttttactgaattcctgtctagtagaaaataagaagtatgtgtgtttgtatgtgtgtgtgtgtctgaaaaaaggaaaatgcaaactagtctttgaaatatgtactcccttttccccatttttaactgtatcaagagaatgaatgcggaagtgtgtttataaactttgaagtatttttgaaacatttggatgttagaaaatgtatcgtttacaggcaaataatttgtctgttacttagacttatattctgacattgacttgacccataaaataaagactattgttgaaatattatcttactcatttttacaaacataagaatgggaatccataaattttatttcatttcatatgtgataaaatggaaagattattatcattgatagggtaatagtgctcatttctttgcccactttatatctggggagaaacctacatagtattagatattttaatatgtttttgaaataagaaagttaaatgctccggaaacaggttaagaaaatgtaaaatgtagtaagatttctctcttagaattttttccatttttatggccccaaattcttaagttgtgtgaatgttatcaaattaagataatttaatacttatttatgacctttctatatttttttattcatgggattaaatgaaactgcatataacaagatttatgaaaataaatcctttttaaggtagtgggacaaataattggattttccaaatgccctaaacactgatttttaatattaaattcattttggtgaggctggtatatccccccttcaggttgatgtgtggtggtagccttatattctgagtataatctctactgtgtccctctttgatatgaagatggtaaagggtcattcactgtgtaagcaagttctcttggttaataaatggcttatgtggccttgatcagataatataaagcttgaaatagggatcgttgctgtctttgctgtcctttcttgaaggaaggtcacctctgagcaccattaatatcaaggagtttcttaaacagcagttttgttttctataccacttgctcccttagtgtcttggagttggtctccaattacctttatggatttgtaaaagtgcatttttttttttctgaagctgctgctatatttattctgggaatgaccttttaattacaaactctccttccacaagggggtaaggaccgaagaccacaaactgggtgaagtggtaggcgaacctctaatgatcctagcagaggttcgtgagcaggtctgtatttaatgtggaactgacactggagggccaagcacacctgggcttcctccattattattttgctgctctgatgtgggaggcagcccagcagtataaaaggtggcaaaggaggcaggacacacatatggatggagccacacctttctgcactgtcgcagatacgccttggacagctttctgaacaactgatagagattgtgaaaatgctgttttgtaggatttaagccaacaatgactcttttactggctttaatagaaaatcgtggagtgatggaagagtatgatttgaagaggtccaatgaatatttatttatctaccttgcttacacttttactgtaatcattataacaacgagctgaacaccagctcttcgtcaagtgcttttcatttatattcactaacctttacaatactcttgcaagctaggtattatttatccccattttacagatgagaactgtgaggaaaagcgatgttataatgacccaaggtcacacaataaatggattgggacaccgtctatttggttctaaagagaaagtccttttctctttttgttagccacatggactccttgtatgtaaccaaatccttctacccatatttcaaaagttcagggtggtcagtcttttaaagtaacttttcttttttttatggctcagaaaatgaatttgtaatcaaaaccaaaacggataatggttttaaattcttctgatttttctacctgtaaaagttcgtatagatcaagatcattaaaacctcatgccaatc

SEQ ID NO: 229 - DNA, 4047 bp, Homo sapiens
tgtgttaagttttgcatttgtgaaagaggccttaataaaatcaatccaagtttaaaatcatccaataagagatttctttcttggctaaaggtctaggtgctactttcctgaataataagctgcactttagggaactcatgttatgttagtgtcagccaactggacactcttaaattgcttcaaatggtgtactagaggataatgctttctctctaataacagtagagttttagaggtgatttgtgtgctttcataggggaaacaactcctaatttctctgccacatttccagtttaggatttaaattgatatatgttgctacgttctgctaaaacaattttccatacccatttgagctggtgaagtgaaaacattttgaaaccagtttccttgaagatttatcaagcagttttgttgatgtgtcttgctatacttcttttacctatcacagaaataaaatcccaggctaggcagcagtgaaggcctttggatctgtgtgagcatgtcaaaagcattttaagaagagcaaaatatttagaggaagaatttgggaaagcagccttaagggatttaacacatttttcttcttctaattcagtctcgtgttcatccctctaatggagaaaggtcattaatggataagatttgctaagccagcaaaggcttttagaaacaaaatggttttcaaaaatccaagcctaaggaaaacagggtttgaatttgggagcttgaaagaatacatttagagaaggtgtatatgcagtgtaaattatattcattcacttaatattatacatatatatttataatcaagttatagtatgtttgttgcattcttacacatttttgttttggagaagttaaaataacgaattggcttgataatgaagattgaaataatttcagactgtggaagttctgtataaatttctaggcagacaaaatggctgatcagaatagcatgacggagttttagttgtcctgttactcgtctgctatttttacgtgcccgagatctgggccaagattgtttaccttaattgttgtgatgtggaggttagtaagtgtgtgaaatttgttacatttcaatctcataattgaaaagccacaggcaaattcttgttcttttactgaattcctgtctagtagaaaataagaagtatgtgtgtttgtatgtgtgtgtgtgtctgaaaaaaggaaaatgcaaactagtctttgaaatatgtactcccttttccccatttttaactgtatcaagagaatgaatgcggaagtgtgtttataaactttgaagtatttttgaaacatttggatgttagaaaatgtatcgtttacaggcaaataatttgtctgttacttagacttatattctgacattgacttgacccataaaataaagactattgttgaaatattatcttactcatttttacaaacataagaatgggaatccataaattttatttcatttcatatgtgataaaatggaaagattattatcattgatagggtaatagtgctcatttctttgcccactttatatctggggagaaacctacatagtattagatattttaatatgtttttgaaataagaaagttaaatgctccggaaacaggttaagaaaatgtaaaatgtagtaagatttctctcttagaattttttccatttttatggccccaaattcttaagttgtgtgaatgttatcaaattaagataatttaatacttatttatgacctttctatatttttttattcatgggattaaatgaaactgcatataacaagatttatgaaaataaatcctttttaaggtagtgggacaaataattggattttccaaatgccctaaacactgatttttaatattaaattcattttggtgaggctggtatatccccccttcaggttgatgtgtggtggtagccttatattctgagtataatctctactgtgtccctctttgatatgaagatggtaaagggtcattcactgtgtaagcaagttctcttggttaataaatggcttatgtggccttgatcagataatataaagcttgaaatagggatcgttgctgtctttgctgtcctttcttgaaggaaggtcacctctgagcaccattaatatcaaggagtttcttaaacagcagttttgttttctataccacttgctcccttagtgtcttggagttggtctccaattacctttatggatttgtaaaagtgcatttttttttttctgaagctgctgctatatttattctgggaatgaccttttaattacaaactctccttccacaagggggtaaggaccgaagaccacaaactgggtgaagtggtaggcgaacctctaatgatcctagcagaggttcgtgagcaggtctgtatttaatgtggaactgacactggagggccaagcacacctgggcttcctccattattattttgctgctctgatgtgggaggcagcccagcagtataaaaggtggcaaaggaggcaggacacacatatggatggagccacacctttctgcactgtcgcagatacgccttggacagctttctgaacaactgatagagattgtgaaaatgctgttttgtaggatttaagccaacaatgactcttttactggctttaatagaaaatcgtggagtgatggaagagtatgatttgaagaggtccaatgaatatttatttatctaccttgcttacacttttactgtaatcattataacaacgagctgaacaccagctcttcgtcaagtgcttttcatttatattcactaacctttacaatactcttgcaagctaggtattatttatccccattttacagatgagaactgtgaggaaaagcgatgttataatgacccaaggtcacacaataaatggattgggacaccgtctatttggttctaaagagaaagtccttttctctttttgttagccacatggactccttgtatgtaaccaaatccttctacccatatttcaaaagttcagggtggtcagtcttttaaagtaacttttcttttttttatggctcagaaaatgaatttgtaatcaaaaccaaaacggataatggttttaaattcttctgatttttctacctgtaaaagttcgtatagatcaagatcattaaaacctcatgccaatcttactacaggaaaatgggttacaagattgaccataaaccttatactgtcattctagagggtgtaggaccagtatgaagagggaggaagtcacgaattcctgagtttttattggataactttaatttttgtttttagcatgctgacattttgattatgctgaaattttacttgcacaaaatgtagcagaaagtgctacgggtactagctggaaagtagggctctgatttgatccgataaacctggatttggtcactgatggcaggactccggggtttagggtgagacaacctggtcccttgggaaaggtgcccgagcctccctctgttgtaggcagtgttgggctccataagtgtaccgggcagtcatcacattctgcattagctccgcctcattgtgctcaaggagctcgactaataggactattttaaactctccaggatagagataaccttatttggtgctttactaaaggtacagactctcatactttttccttctctttctttttccattccacagatgaacacaatgacgtacagaagaaaacctttaccaaatggataaatgctcgattttcaaaggtaactgagactttcaaaaacttcgatggttcagatgccgcattctgattgaaggagtttggttggaagtgcagtgaattttccccaggaaatgtcacctagccgaagtcttctgagtatgcagatacatttgttgttcctttattctgtcctaaaatatgtttaaacggaaattctcatgcacatagtttatgggacgctattgacttttacctggccttctccagatatctaaggcagcagttagctgctttcgattctgtgaatcctgggtacatcttggaaaagaatatatcattgggaaaat

SEQ ID NO: 230 - DNA, 4041 bp, Homo sapiens
atgaccttttaattacaaactctccttccacaagggggtaaggaccgaagaccacaaactgggtgaagtggtaggcgaacctctaatgatcctagcagaggttcgtgagcaggtctgtatttaatgtggaactgacactggagggccaagcacacctgggcttcctccattattattttgctgctctgatgtgggaggcagcccagcagtataaaaggtggcaaaggaggcaggacacacatatggatggagccacacctttctgcactgtcgcagatacgccttggacagctttctgaacaactgatagagattgtgaaaatgctgttttgtaggatttaagccaacaatgactcttttactggctttaatagaaaatcgtggagtgatggaagagtatgatttgaagaggtccaatgaatatttatttatctaccttgcttacacttttactgtaatcattataacaacgagctgaacaccagctcttcgtcaagtgcttttcatttatattcactaacctttacaatactcttgcaagctaggtattatttatccccattttacagatgagaactgtgaggaaaagcgatgttataatgacccaaggtcacacaataaatggattgggacaccgtctatttggttctaaagagaaagtccttttctctttttgttagccacatggactccttgtatgtaaccaaatccttctacccatatttcaaaagttcagggtggtcagtcttttaaagtaacttttcttttttttatggctcagaaaatgaatttgtaatcaaaaccaaaacggataatggttttaaattcttctgatttttctacctgtaaaagttcgtatagatcaagatcattaaaacctcatgccaatcttactacaggaaaatgggttacaagattgaccataaaccttatactgtcattctagagggtgtaggaccagtatgaagagggaggaagtcacgaattcctgagtttttattggataactttaatttttgtttttagcatgctgacattttgattatgctgaaattttacttgcacaaaatgtagcagaaagtgctacgggtactagctggaaagtagggctctgatttgatccgataaacctggatttggtcactgatggcaggactccggggtttagggtgagacaacctggtcccttgggaaaggtgcccgagcctccctctgttgtaggcagtgttgggctccataagtgtaccgggcagtcatcacattctgcattagctccgcctcattgtgctcaaggagctcgactaataggactattttaaactctccaggatagagataaccttatttggtgctttactaaaggtacagactctcatactttttccttctctttctttttccattccacagatgaacacaatgacgtacagaagaaaacctttaccaaatggataaatgctcgattttcaaaggtaactgagactttcaaaaacttcgatggttcagatgccgcattctgattgaaggagtttggttggaagtgcagtgaattttccccaggaaatgtcacctagccgaagtcttctgagtatgcagatacatttgttgttcctttattctgtcctaaaatatgtttaaacggaaattctcatgcacatagtttatgggacgctattgacttttacctggccttctccagatatctaaggcagcagttagctgctttcgattctgtgaatcctgggtacatcttggaaaagaatatatcattgggaaaatttttgagttctcttggttaagaggatgatgatttcattttgcctggttaaaaccaaatgttataattcaggcagtctttctaccctgtcagaaatatttatggatttttattcttgtggatgtggctaataatatttatctgccttgtgggttgttttttcttgtgtacttccttaattcctcccccaccccaaagatctactcttagcatttctaaccatttagaacataatcaatgctttgagcaatattttttcataggggcagagcatgctgaagagaggaattgtcagtgctattttcaaatctgttctaatatgattatctattagttattggtgttggaattttgtgcactaagcctgaggtaggaggagagttttcaggataacagattgtttaggactcttctacaacaagatgaaaaatagaagtttctcagagaaacactgttgtggtcttttaaatagtataaaagctattttaatgaagagttgcttttcaaaatttttggttgcttttcaaaagttgtaaaggtcagagagacaaacattggtatttcttgaggaaaaatgaggatatcttaaggttactttgagtagcagcatagtttaaaaaatgctccacgtcccaatatttatagttggttatttgatttcactgctttttgggctttgcgagtttatcttgaggggtattttatcttgcctgtgagtatgtaaggaacatgaaaaccaactttgacagagggttaaaaatacagagaattagaacataaaggtgcttgcataattggcagttatatgtgtaggattattccaaatcacatgcaggtgtgttttggtaaattttagtttgttttattccagagacacaggtaacatatgtgcatctcgggcttgacatgaataaaaacttttgaactattcatctgcatgtgaccattttccagagaatgtagttttagcaactgggagtctggatatgaggtgttttattccagtggtcttatgattgctcataaaagtaagattatttttcctggttattcacgaggataacacagtaattgtttagatagaacaagtgaagcagtttttagcagcttaatttagtctttggggaagaattgccttagaactaattttgaagattgttttgaaagcattaaacttggtagacctaagtttagagagcatttgaaactgggtaaattactttttacctatttatgaaaatggagagaaataggtagtaaaataggacatggaaagggtttgtagaggaagagagatgacaactgagacagaataattgaaaagaaatttctcaatatttatggtgggtcattgacacctttaaaaagacctcaaagaaaacaaaatctggtagtaccagactagtttattaaatgaacttgatatttaaatttgtgcatttataatgtctattattttgcaattaaatggggctttaagtcccatgtaaattgtttgccctggaatatttgtatttcttaccaagatactggaaaagacttggtaatttttatcatttttagtaaaagttatagttagttttagctaaaagcttctctattagtgtttggagatggtagtttctaagctcagcttctgtgttagtgtttggagatggtgtttggagaaaaactaccaaacgtgggatgactctgaaaacttttattttcatctagcaagaaatcaaaacctagaaggaatttatctgagaaattatgaatatttggagatgggaagctcatggcagtgacactaaacatccacattattttttctttcttctggctgtcttaagaccataagttggattgcttccaattggggatagtgaaagagggagtaacacatttctagactgggagatttccatagactcccatgtggcttaactcttgctgagctggggaaagaccgtattcatgcctggtattactaggtaatgcgaggatagaacaagaaaaaaaaataaatcccgttgaagggaacgaattttttttttcatttttaaaaatccatgtcctttggtacattgtggtgggttttacaatataatttttcagtgggtccactacttccctacagtgtgggttcctaaacagagcaacaggacctctgtgctgagaaatccaaacagacactgatggcaccttctgccatttaggaatttgttttaaaacagacatttgtctagatatttcctttgtggcctcctccccatcaaaag

SEQ ID NO: 231 - DNA, 4050 bp, Homo sapiens
aaagggtttgtagaggaagagagatgacaactgagacagaataattgaaaagaaatttctcaatatttatggtgggtcattgacacctttaaaaagacctcaaagaaaacaaaatctggtagtaccagactagtttattaaatgaacttgatatttaaatttgtgcatttataatgtctattattttgcaattaaatggggctttaagtcccatgtaaattgtttgccctggaatatttgtatttcttaccaagatactggaaaagacttggtaatttttatcatttttagtaaaagttatagttagttttagctaaaagcttctctattagtgtttggagatggtagtttctaagctcagcttctgtgttagtgtttggagatggtgtttggagaaaaactaccaaacgtgggatgactctgaaaacttttattttcatctagcaagaaatcaaaacctagaaggaatttatctgagaaattatgaatatttggagatgggaagctcatggcagtgacactaaacatccacattattttttctttcttctggctgtcttaagaccataagttggattgcttccaattggggatagtgaaagagggagtaacacatttctagactgggagatttccatagactcccatgtggcttaactcttgctgagctggggaaagaccgtattcatgcctggtattactaggtaatgcgaggatagaacaagaaaaaaaaataaatcccgttgaagggaacgaattttttttttcatttttaaaaatccatgtcctttggtacattgtggtgggttttacaatataatttttcagtgggtccactacttccctacagtgtgggttcctaaacagagcaacaggacctctgtgctgagaaatccaaacagacactgatggcaccttctgccatttaggaatttgttttaaaacagacatttgtctagatatttcctttgtggcctcctccccatcaaaagtcaatcaaacatcgagccttgttaattccaatacctacatatattcaaaattgtccacttactctatgtagagtgacacgtctcttttccaaggcattgttatttgtattagaaaaaatggtgagagactttacaatgggcaaaaaactagtgggtgtcctgttagctcaggcatctgaattatctctgcctttaattacttttgagctactttacgactaggtaagttgtggaaaataggtatgcaaatgattcttatccataaaaatgaaaattatttgtaaagcagttaattattactccttggatagaccagtttttgcatctattgcaaatctatttcagttttcatttttcttgtgtaaaacatgtgtttttaaaaattttcccctgaactggttgtaacagcttactgggtccctcattaattaatgagttaaataaatctttgacagacattattatcacattggtttgagagttatgactttaccttgttggaaaattatccttgaatacatggaccactgtgataatctgctaattggttcttccattccatgctccaccttctccatctccctttcctttttttttcttttctttttttttttttttttttttgagacacagtctagctctgttgcccagtctggagtgcagtggtgcaatcttggctcattgcagcctgcagcctctgcctcccaggttgcagcgattctcctgcctcagcctccctagtagctgggattatgggcgcatgtcaccatgcccagctaatttttgtatttttagtagagatggggtttcaccatgttggctaggctggtttcaaactcctgacctcaagtgatccgcctgcctcgacctcccaaagtgctgggattacaggcgtgagccaccacgcccggcctccccttccattttcaagagagtatctacggtgcttctaaagggtaaacctgaatacctttttctcttctgtaagctctttcgttgggtgcccattttcctttttttaaaaaacacaattaaaaattgaaattgtataatttttggtatatagtgtgatgttttggtcttacttggttcttaaagctctaaatagctgcctcccaatttactcctaattttattttactttcctctcgctccctcattttgctccagccacacggcctttgcttaccatcccggtgggccctccctggcctttgcacacagtcctttctctatctcttcctggccagctcctaccccttcctgcttgtctgagcttaaatgttgcttcctgaaggatctcttttctgagctcccagactagggtagataagctgtatactctcaaagtgttatgatttgaagcacttaccatactgtaatttaaatagttgccagccttttttcctaggttagacataaactctgtgggtgcagggactttctatttgcttattggcatatcttttggcatttagtaggtatccagtaaactatttgtaggcttaataaataaatgaatgacaatgacatagacatacattgaatatgcctaattctatatgttcataagccacttggggatggttgcattggagagacaggagtagagtttaggactgagtgcaacatggcatgaattgtgctaagtcctggatatgaatacaatgcatcaggacttttgctgcattattgacaaaaataaacaaatccagctatccaaactttccctatttacctgatttcttggagttgtgctgcagtgattgttaaataaccacttggacttaatgcatattattgttttatttacccaatacaattcttcacatagggtctaactattaaattcactgtgaagaaaaataagacttaaaacttaaagccagaacaattcttttcttgataagggatttggtaaagaacttgagaataatatcagtctaaaaccatcttttaatttgtaactgtaaatgaatatacagtaaccaagacagtgctcactcaaaatatgtattctttttgctgcaaatccttgtgaacatatcatggagtatacagtgctttggaattcaggatcctgagaagtcatagtgtagagtaaattatggctcttggatttttaaaagttatgaagagctcagaaaaagtgattatctaaaaaaagctaaaaattaggaaattaaacacttatttctggatatcctgctcatttatttatgacctcaggcaaattattagtcaattttttcagatcacctggtctacatttccatagccataagacgcaatcgatcattattaccttccttatatcgtgaagaaatattgaggcattgctgagaagtgtataggagatgataattacttaggaatgcaaaataaaaaccctatcatatacctcgaatctgtgatagtcctgatctgtggatccgtgccacacgtaaacagaaaagggaaaaagcactggctcattaagcccgcgttcttccattgtatggtgtgtatgacttgagtgttttgccccttctaaatttcagagcctctggcttgttagccggccggtctcccaagggaggcagcaaaggcctcattgctttgctttgggaaatttgctctgactttgagcctgcattttctttggctgactttcagagctgctcatctggcagagctgaaaacatacaaattgcagaagttcttttatccatttggtgagatggttctctaaagaggcttcacaaataaaggttaggtagaaaatatgcaaaattaaaaatgctgaacttgagtttgtgcaaatccctgcttttctcttttctaagacacagatgagccaagttttcatgtaagttacaattccaaccttgaaattcaaattgacagaacgtaagagaggaaagccatgaagcattttttatggattccaatatggagagctattaagatgttttcctttaggagacagtgagacattgcttttagattgttttcctacttttttcatgttggaagttaataatcactaaaataagggtgggaaaagatgtggagggag

SEQ ID NO: 232 - DNA, 4040 bp, Homo sapiens
ggttggacagaggtattggtgtttttatgaagctgcctaggagatttcaacgtgcatgcaagttagggaactggtatcttaagatgttgttagttgagggattttcatactgtgaacaccagcttccagggtggtaacctgagacctcagccagatctcctgcctctgaggggccctgtacgctgagcttcacttctgtgtgtatctcagtgctagtgttagtcaggcatatggagggacaatcagttttacttgcttttttgttttattttccagccaaaggaacgtggttccacaagggtacatgccttaaataacgtcaacagagtgctgcaggttttacatcagaacaatgtaagtgtgtaatgtgagttctgggggtctgtgctgccatcagcattatttattgtgaaactcaccaactgcttgatgcattggcatccactgattcttgcaaacattttttcttatgagaaatactgaactttttctgtgagtgaagaaacagtcatgtgctttttctgatggctgtattgatctgtagtataaataatacatttttgagatttaagcttacctgattctctaaaatgaaatttctcttatctctcacttatactgctgtccaaatgtgctaaaataaaaacctggagttctgtgaagaaattgtcttaaaagcgtttttgtttttgttttttgttttgtcttaataggtggaattagtgaatatagggggaactgacattgtggatggaaatcacaaactgactttggggttactttggagcatcattttgcactggcaggtggggaaatttccaatcactttttaatagagatggaaaatgtgttgtttgtcttttagtttcttaaggctgccgtaaccaagtaccacaagctgcttggcttgaacaacagaaatttgttgtctcccagttctggaggccagaagtccaagatcaaggcatcagcagggttggtttttcctgagggctctgagggagactctgatccaggccttgcccccaaattctggtggtttgtctgcaatttttgcagttccttggcctgtgataacatagctccagtgttgacgtggtgttctccctgtgtgcatatctgtcaaatttcctctttttgtaaggacatcagtcatattggatttagggcccacattactcctgtatgacctcattctaactagtgacatctgcaatgaccttatttccaaatagagcccctctctgaagtactgagggttaggacttcaacatattaattttagagaacataattcaactcataacaattttcaatggaagaggctgacaaaatgccctattttcctggcatagggaaaaaagtacctacctttcttatgttaaattttaaaaagggacataatttcacatctagaaaagttgcaggaatagttcaaagaattcccaagtacctttcactcacatttcctaaatgttaccagttgtctatatttcatttgtactctctctcagtctgcctaaaatatttagtgtgtattttctaacgccatggcattctcctaaaaacaagaactctcttatgtaaacacaatagcatattggtataataatatgagatgtaaaatattgatatttaaaatgccaattattgattattaaatatgaaaacttagtatataattattaaaatcaagaaaataacattgaaataatacaattatgtaatctacagatcttaagattttgtcagttgtcccaataatatccttagtagcaaaagaaaatctgagatcatgcattacatttatttttcatgtctctttagtcctctttaatctggaagtttttgagtctttgtatttcatgatattgatatttttgaagagtgctggctagttattttgtagaatgtctctctcagtgggcttgggcttggctgagctttccttatgattaagttcaggttgttcacttttggcagggacgtcacaaaagtgacgtgagttcttcttagtgcatcatatcggggataggtgatatctgttctttttctggcagtgttaactttgattgtttggctaaggtggtatttaccaagtttcttccctgtaaattgactaccctttgttattaaaagtatcgggtggggatatactttgagactgtataaatatttagtttttatcaaacttttagcacccgttcataatttttgcctggaccagctattattatgatgcttgatagataatgattttctaatttcattaatccttctacattagttggtgttctacttgtaaagaagagcttccccttgtttcttgtttctctatcttatctctctctccattcatttattcatttatgtatcagtatagattcatggacatttgcataggtttatgatcttttactagtactcatttcagtgttcaagtcatcctagatttggccagtgtgagccccttaaattggctcctgtgtcccttagatagatctatgtcattctttgagcactttcttaaaacatatttactaatttagaataatactataaaatgttagttctagagtataatcgtgattgcagtcaggaaagatactttattttgtagtcactcaaaagtttttcctttctcatttttgtagaaaataaaatttaattgaaaaggtctttgtaaacacatagagttaaatatgactttctatgactgtgaaagttatgttcattgtaaccaaacatagtacaagtattgcttaagatatagaaaacacagtaatgtataaaagtgaggtaaaaatcacctcaaattctagtcccccaaaataatcactgttaaaatgtattgctctagtgtctacagaaaaatctgaagtaaaatgaatgccagttacctgatccataatggttaattagtgcaatattgctttttcaaggacttcattgaagtaagttgaagtaaattactgaagtattagttatggacaggcctggtttctcttacataggtgaaagatgtcatgaaggatgtcatgtcggacctgcagcagacgaacagtgagaagatcctgctcagctgggtgcgtcagaccaccaggccctacagccaagtcaacgtcctcaacttcaccaccagctggacagatggactcgcctttaatgctgtcctccaccgacataagtgagacattactctatctagaagtgggctttacaaattcatgtctcctctctgtccctttgctgccaccactactccctgaagccccttctccagtgccactgctctcctttctgcacatgttctaccaaaaccttaagaaaagaaatatcatggaagaaaactacccatcaggtttttatttccttaggacttaaatgctgcaatacaaggtccatagtttctcctgcatatttatgaatttaaaaaatatgaaataattcacaaagttcaaccccactcattcagcactaactgataatgtatacaaaaaattgtgttagcttttcttctcaaactgaaagtaaaactctgtaaattcaatgcattcccaattaaaaatagccaaattgtctttaatgaaacttgtgaacagattctaattatataaaagacgaggcccaagaatagccagtagacttctgaggaagaatcaggctgaaatactttccaaaaagaaaccaaaactatgaagctatattaattaagactatgcagtactatcaatatacacaccaatataagctgaaccatatgaaattgccgacatgtgagtgtttttgctatataagaatggtgttttcatatggttcaacctaataaaattaagaactcagaaattgctccattacacaggaaaatctgatatacgcttgagctgacattgcagattaatagatgatttggacaattgattacccatatataaataaatgtattggatctttacttcaccacactaaaaaaaaaataataatttctacatggatcagggatttaaatgccaaaggcaaaatttgttatattttattgt

SEQ ID NO: 233 - DNA, 4050 bp, Homo sapiens
agttaaatatgactttctatgactgtgaaagttatgttcattgtaaccaaacatagtacaagtattgcttaagatatagaaaacacagtaatgtataaaagtgaggtaaaaatcacctcaaattctagtcccccaaaataatcactgttaaaatgtattgctctagtgtctacagaaaaatctgaagtaaaatgaatgccagttacctgatccataatggttaattagtgcaatattgctttttcaaggacttcattgaagtaagttgaagtaaattactgaagtattagttatggacaggcctggtttctcttacataggtgaaagatgtcatgaaggatgtcatgtcggacctgcagcagacgaacagtgagaagatcctgctcagctgggtgcgtcagaccaccaggccctacagccaagtcaacgtcctcaacttcaccaccagctggacagatggactcgcctttaatgctgtcctccaccgacataagtgagacattactctatctagaagtgggctttacaaattcatgtctcctctctgtccctttgctgccaccactactccctgaagccccttctccagtgccactgctctcctttctgcacatgttctaccaaaaccttaagaaaagaaatatcatggaagaaaactacccatcaggtttttatttccttaggacttaaatgctgcaatacaaggtccatagtttctcctgcatatttatgaatttaaaaaatatgaaataattcacaaagttcaaccccactcattcagcactaactgataatgtatacaaaaaattgtgttagcttttcttctcaaactgaaagtaaaactctgtaaattcaatgcattcccaattaaaaatagccaaattgtctttaatgaaacttgtgaacagattctaattatataaaagacgaggcccaagaatagccagtagacttctgaggaagaatcaggctgaaatactttccaaaaagaaaccaaaactatgaagctatattaattaagactatgcagtactatcaatatacacaccaatataagctgaaccatatgaaattgccgacatgtgagtgtttttgctatataagaatggtgttttcatatggttcaacctaataaaattaagaactcagaaattgctccattacacaggaaaatctgatatacgcttgagctgacattgcagattaatagatgatttggacaattgattacccatatataaataaatgtattggatctttacttcaccacactaaaaaaaaaataataatttctacatggatcagggatttaaatgccaaaggcaaaatttgttatattttattgttgtaaatgattacttttctcaaatttcacttcctctatgtttttttgctggtatataaaagtgcaatagacttttctacgtcttatatctggaaacttaatcagttcttacaaattttagtaagtttgtctctagattgtaggtttcttggaggaggagggattagaatgtcctagaattatgatccttttatttcttctgttttcttttttgttctctattgtgccttgtccttcaatgcaatgttgatttgaattggtgatagtgggcagaatttttgttgttgataataaaaggagtgcttttagtgttttaccataagaatgatagtttttgtagcttttttggtacactttttatgaggttaaaggaggttgccctaggtttttagttggttaagggattttatcaagaaactgtagaattttagccaatataccattccatttattaattaattgattcaacaaatacgtgtggggtgccttttatgtgctagacacagggtatacagcagagaacaaaacaggcaaaaatcttagttctcgtggagcttatgttccaacagagggagacaagacaataataaagttgtgtagtatatagaaatgtacacacactgaaggaaaatacatcagacaagagcagaggaggcacttggcatcggagagggcagtggctgcagtgacctgagtggggggagtaatgggagatgaattcagggagggaagtgggggaagtgcatcccagaaggtgggtgggtctaacatgcaagaacagacacagaataaagaaaatgattaacttttggataagtcaaagcaacaataatgtccaatttgtgagattaaaagaaaatcaagatagaaatgaaatacagtcctagacaatatagtagtagcatggaagcaggggattggagggaaactcttccaaggcttttgttttaggaatatcctgagaacagattagagctagattttgtgttctgctaatcttgatcttttaattgaagaatttagtccattaacattgattatgattatttatatatttaggttcatttttaccgcatagtgtgagctgctcatttttcttattttttctgtggttttttttttttttactttcttatctctttttgtatcggtaggtttccctttacccccttttcttcttctactctttgggaaacattatatactacttctagtcttaatggttaccacagaaaatagcagtcctatttagctaatacaagacccttggaaagtattatctgttattttcatatttgtgaattaatttcaagtatgtatttgacaagcctttgggatataaaaataaactcaaaaaaacctcacaaataaaaataatctaaaactaaaatgtattagattataacaatgcctactttgtttccacatatttcatcttcattgcattttatttgcatggttttcagacctgatctcttcagctgggataaagttgtcaaaatgtcaccaattgagagacttgaacatgccttcagcaaggctcaaacttatttgggaattgaaaagctgttagatcctgaaggtattgtccagtatttaatttccaccttgattttgctttacagttttgcattcttgaaaagcagtgtttctttgtccttttaaaaatgaattatgagacttgaagaaccttttcctttttggagtataggtgcgagtcattttattactgacacttattaatacttttgtacttagcagtttgtgggatcttttaggtagaaatttaactacagcactggacaatagttaatctaaattaagtaagagttaaagttttaagaaaatgtaattattagataaattcagtatctggttagtccaataaaatgcatttttatgtgagcatcttgcatgtgatgtaaagactttagttataaatgttgcaggattgaattctagacttattttcatagtatgaataaagtctgtatctttatcttaaatggtaacatatggtagcttatctttgaccattttggggaggcttttagggaagactttaaaaaatgagatactgaacaaaaataagtaatcccttttgcctttgtctcatatattatgaagtggcaatttactggtattgcaaagattatatattaggtattgtttatgggtactaaggagagttattttatatctaatattgagcaattcacatattttggacacctaatttaagctggttcttatattcttccacttttagatgttgccgttcagcttcctgacaagaaatccataattatgtatttaacatctttgtttgaggtgctacctcagcaagtcaccatagacgccatccgtgaggtagagacactcccaaggaaatataaaaaagaatgtgaagaagaggcaattaatatacaggtacaggtaacattttattaagatgtttggcttgccgtatttgttttctcctaggtactagataaaaacacttttagagggtttttttcttgactgagaacatcttggtttctcagcttacatttgcataagaagttcagcttagcagttagcattctgtcacatgtgtgtaatagaacaccataactcaatggactttattaagaaggaaaatactttatttcacccagcaaaactgggctgttgctcatgctgctgcatgacatgctgggaat

SEQ ID NO: 234 - DNA, 4078 bp, Homo sapiens
gtaaattcaatgcattcccaattaaaaatagccaaattgtctttaatgaaacttgtgaacagattctaattatataaaagacgaggcccaagaatagccagtagacttctgaggaagaatcaggctgaaatactttccaaaaagaaaccaaaactatgaagctatattaattaagactatgcagtactatcaatatacacaccaatataagctgaaccatatgaaattgccgacatgtgagtgtttttgctatataagaatggtgttttcatatggttcaacctaataaaattaagaactcagaaattgctccattacacaggaaaatctgatatacgcttgagctgacattgcagattaatagatgatttggacaattgattacccatatataaataaatgtattggatctttacttcaccacactaaaaaaaaaataataatttctacatggatcagggatttaaatgccaaaggcaaaatttgttatattttattgttgtaaatgattacttttctcaaatttcacttcctctatgtttttttgctggtatataaaagtgcaatagacttttctacgtcttatatctggaaacttaatcagttcttacaaattttagtaagtttgtctctagattgtaggtttcttggaggaggagggattagaatgtcctagaattatgatccttttatttcttctgttttcttttttgttctctattgtgccttgtccttcaatgcaatgttgatttgaattggtgatagtgggcagaatttttgttgttgataataaaaggagtgcttttagtgttttaccataagaatgatagtttttgtagcttttttggtacactttttatgaggttaaaggaggttgccctaggtttttagttggttaagggattttatcaagaaactgtagaattttagccaatataccattccatttattaattaattgattcaacaaatacgtgtggggtgccttttatgtgctagacacagggtatacagcagagaacaaaacaggcaaaaatcttagttctcgtggagcttatgttccaacagagggagacaagacaataataaagttgtgtagtatatagaaatgtacacacactgaaggaaaatacatcagacaagagcagaggaggcacttggcatcggagagggcagtggctgcagtgacctgagtggggggagtaatgggagatgaattcagggagggaagtgggggaagtgcatcccagaaggtgggtgggtctaacatgcaagaacagacacagaataaagaaaatgattaacttttggataagtcaaagcaacaataatgtccaatttgtgagattaaaagaaaatcaagatagaaatgaaatacagtcctagacaatatagtagtagcatggaagcaggggattggagggaaactcttccaaggcttttgttttaggaatatcctgagaacagattagagctagattttgtgttctgctaatcttgatcttttaattgaagaatttagtccattaacattgattatgattatttatatatttaggttcatttttaccgcatagtgtgagctgctcatttttcttattttttctgtggttttttttttttttactttcttatctctttttgtatcggtaggtttccctttacccccttttcttcttctactctttgggaaacattatatactacttctagtcttaatggttaccacagaaaatagcagtcctatttagctaatacaagacccttggaaagtattatctgttattttcatatttgtgaattaatttcaagtatgtatttgacaagcctttgggatataaaaataaactcaaaaaaacctcacaaataaaaataatctaaaactaaaatgtattagattataacaatgcctactttgtttccacatatttcatcttcattgcattttatttgcatggttttcagacctgatctcttcagctgggataaagttgtcaaaatgtcaccaattgagagacttgaacatgccttcagcaaggctcaaacttatttgggaattgaaaagctgttagatcctgaaggtattgtccagtatttaatttccaccttgattttgctttacagttttgcattcttgaaaagcagtgtttctttgtccttttaaaaatgaattatgagacttgaagaaccttttcctttttggagtataggtgcgagtcattttattactgacacttattaatacttttgtacttagcagtttgtgggatcttttaggtagaaatttaactacagcactggacaatagttaatctaaattaagtaagagttaaagttttaagaaaatgtaattattagataaattcagtatctggttagtccaataaaatgcatttttatgtgagcatcttgcatgtgatgtaaagactttagttataaatgttgcaggattgaattctagacttattttcatagtatgaataaagtctgtatctttatcttaaatggtaacatatggtagcttatctttgaccattttggggaggcttttagggaagactttaaaaaatgagatactgaacaaaaataagtaatcccttttgcctttgtctcatatattatgaagtggcaatttactggtattgcaaagattatatattaggtattgtttatgggtactaaggagagttattttatatctaatattgagcaattcacatattttggacacctaatttaagctggttcttatattcttccacttttagatgttgccgttcagcttcctgacaagaaatccataattatgtatttaacatctttgtttgaggtgctacctcagcaagtcaccatagacgccatccgtgaggtagagacactcccaaggaaatataaaaaagaatgtgaagaagaggcaattaatatacaggtacaggtaacattttattaagatgtttggcttgccgtatttgttttctcctaggtactagataaaaacacttttagagggtttttttcttgactgagaacatcttggtttctcagcttacatttgcataagaagttcagcttagcagttagcattctgtcacatgtgtgtaatagaacaccataactcaatggactttattaagaaggaaaatactttatttcacccagcaaaactgggctgttgctcatgctgctgcatgacatgctgggaatctatgttttcacatcatctggttgccagcttttatttctgtcatgtgctaaagatggtttttctcatatcagcctagttttttttctaagtactaattgtctttctttttttgccattgagaaaagattttttttccattatatatctcacaagggctatcaaaatgtaagccttattttccctttcctttaggaggagtaatgtatggtaaactacttggtgagcttttcatgaagggattacgatgatttcattcatcaggatataaatgaatttttaaagagagaaataaaatcataatttattttcttccttagttctactgtttgaatcaatccatatttaatctcattctgttttagtctagccagtccttgtaattcataagatgagagaatcttaagaattggaccttagaagtcacttggttcaacattctagtgaccaagcaaccaagacatacatgtagatttcaaaattataagaactacatttcagagagaaagaaagcttctctggatggaccttaaattcatcctgttgctacttgttttgggttgttacttaaactctcaatcacagttttgtctgcaaaatgtggttaaaaccaccaacttcataaagataatgaattcaaagtatctaaaatgacattaataaacactcaacaagcaacagctatcattattatcatttttcttcttgatttgttttggcattctcatttaacagatttctttaaaaaatattatttaattcccatattatgatactagtcttgaattgacatagcatcttttttttccatcctctgagattcagagaatttacttattcttttaaattttctttgggtaatatgtacccatcctt

SEQ ID NO: 235 - DNA, 4061 bp, Homo sapiens
ttgttgataataaaaggagtgcttttagtgttttaccataagaatgatagtttttgtagcttttttggtacactttttatgaggttaaaggaggttgccctaggtttttagttggttaagggattttatcaagaaactgtagaattttagccaatataccattccatttattaattaattgattcaacaaatacgtgtggggtgccttttatgtgctagacacagggtatacagcagagaacaaaacaggcaaaaatcttagttctcgtggagcttatgttccaacagagggagacaagacaataataaagttgtgtagtatatagaaatgtacacacactgaaggaaaatacatcagacaagagcagaggaggcacttggcatcggagagggcagtggctgcagtgacctgagtggggggagtaatgggagatgaattcagggagggaagtgggggaagtgcatcccagaaggtgggtgggtctaacatgcaagaacagacacagaataaagaaaatgattaacttttggataagtcaaagcaacaataatgtccaatttgtgagattaaaagaaaatcaagatagaaatgaaatacagtcctagacaatatagtagtagcatggaagcaggggattggagggaaactcttccaaggcttttgttttaggaatatcctgagaacagattagagctagattttgtgttctgctaatcttgatcttttaattgaagaatttagtccattaacattgattatgattatttatatatttaggttcatttttaccgcatagtgtgagctgctcatttttcttattttttctgtggttttttttttttttactttcttatctctttttgtatcggtaggtttccctttacccccttttcttcttctactctttgggaaacattatatactacttctagtcttaatggttaccacagaaaatagcagtcctatttagctaatacaagacccttggaaagtattatctgttattttcatatttgtgaattaatttcaagtatgtatttgacaagcctttgggatataaaaataaactcaaaaaaacctcacaaataaaaataatctaaaactaaaatgtattagattataacaatgcctactttgtttccacatatttcatcttcattgcattttatttgcatggttttcagacctgatctcttcagctgggataaagttgtcaaaatgtcaccaattgagagacttgaacatgccttcagcaaggctcaaacttatttgggaattgaaaagctgttagatcctgaaggtattgtccagtatttaatttccaccttgattttgctttacagttttgcattcttgaaaagcagtgtttctttgtccttttaaaaatgaattatgagacttgaagaaccttttcctttttggagtataggtgcgagtcattttattactgacacttattaatacttttgtacttagcagtttgtgggatcttttaggtagaaatttaactacagcactggacaatagttaatctaaattaagtaagagttaaagttttaagaaaatgtaattattagataaattcagtatctggttagtccaataaaatgcatttttatgtgagcatcttgcatgtgatgtaaagactttagttataaatgttgcaggattgaattctagacttattttcatagtatgaataaagtctgtatctttatcttaaatggtaacatatggtagcttatctttgaccattttggggaggcttttagggaagactttaaaaaatgagatactgaacaaaaataagtaatcccttttgcctttgtctcatatattatgaagtggcaatttactggtattgcaaagattatatattaggtattgtttatgggtactaaggagagttattttatatctaatattgagcaattcacatattttggacacctaatttaagctggttcttatattcttccacttttagatgttgccgttcagcttcctgacaagaaatccataattatgtatttaacatctttgtttgaggtgctacctcagcaagtcaccatagacgccatccgtgaggtagagacactcccaaggaaatataaaaaagaatgtgaagaagaggcaattaatatacaggtacaggtaacattttattaagatgtttggcttgccgtatttgttttctcctaggtactagataaaaacacttttagagggtttttttcttgactgagaacatcttggtttctcagcttacatttgcataagaagttcagcttagcagttagcattctgtcacatgtgtgtaatagaacaccataactcaatggactttattaagaaggaaaatactttatttcacccagcaaaactgggctgttgctcatgctgctgcatgacatgctgggaatctatgttttcacatcatctggttgccagcttttatttctgtcatgtgctaaagatggtttttctcatatcagcctagttttttttctaagtactaattgtctttctttttttgccattgagaaaagattttttttccattatatatctcacaagggctatcaaaatgtaagccttattttccctttcctttaggaggagtaatgtatggtaaactacttggtgagcttttcatgaagggattacgatgatttcattcatcaggatataaatgaatttttaaagagagaaataaaatcataatttattttcttccttagttctactgtttgaatcaatccatatttaatctcattctgttttagtctagccagtccttgtaattcataagatgagagaatcttaagaattggaccttagaagtcacttggttcaacattctagtgaccaagcaaccaagacatacatgtagatttcaaaattataagaactacatttcagagagaaagaaagcttctctggatggaccttaaattcatcctgttgctacttgttttgggttgttacttaaactctcaatcacagttttgtctgcaaaatgtggttaaaaccaccaacttcataaagataatgaattcaaagtatctaaaatgacattaataaacactcaacaagcaacagctatcattattatcatttttcttcttgatttgttttggcattctcatttaacagatttctttaaaaaatattatttaattcccatattatgatactagtcttgaattgacatagcatcttttttttccatcctctgagattcagagaatttacttattcttttaaattttctttgggtaatatgtacccatccttttatttcccccgtttcaaaaatagtgtgatttatagaaaaagaaaaaaatttactgaaaagaaaggattgagaaatgaggcctgattgtgaacccagggctctcttttgtagtgaatatcaaatgatgctgaggaaaattcctaacttactataattgaaaaaaatgctaggaagtatttgcctctaaaagtatagttattattctacattaatgatgcacctttttagttggctcagatgatcttctgagtttgttacagggttttagattcatttccttattgcattttgttagaaggaggagatattttatttagttcttatagttaagggccttctctcttaaaaaggaaggagacttcatttacttttcatgatgtgtagataaaataatcacttctgtttagggctcagcgtggcatgataagaacttcagaaaacatttgctatttgattaagtgcaagtgtattaacacctcttcatttgcaagctttcattagtgtcttagaggctgaattacgttaattgaaaactaaaatgtgatcaagttttaatcatctctctgacatagcttgccatctgctactctcctaatagtcagacttcttctgccctgttctttctacaaacatacgctggtggtcaatgaataattcctgcatttctctttaaatatccgtcagttgaaagtttcctcatgtgttcgaattaataccgtctgaacatttgtgtttagatagtgccttccttctcgacctcat

SEQ ID NO: 236 - DNA, 4064 bp, Homo sapiens
tttttggtacactttttatgaggttaaaggaggttgccctaggtttttagttggttaagggattttatcaagaaactgtagaattttagccaatataccattccatttattaattaattgattcaacaaatacgtgtggggtgccttttatgtgctagacacagggtatacagcagagaacaaaacaggcaaaaatcttagttctcgtggagcttatgttccaacagagggagacaagacaataataaagttgtgtagtatatagaaatgtacacacactgaaggaaaatacatcagacaagagcagaggaggcacttggcatcggagagggcagtggctgcagtgacctgagtggggggagtaatgggagatgaattcagggagggaagtgggggaagtgcatcccagaaggtgggtgggtctaacatgcaagaacagacacagaataaagaaaatgattaacttttggataagtcaaagcaacaataatgtccaatttgtgagattaaaagaaaatcaagatagaaatgaaatacagtcctagacaatatagtagtagcatggaagcaggggattggagggaaactcttccaaggcttttgttttaggaatatcctgagaacagattagagctagattttgtgttctgctaatcttgatcttttaattgaagaatttagtccattaacattgattatgattatttatatatttaggttcatttttaccgcatagtgtgagctgctcatttttcttattttttctgtggttttttttttttttactttcttatctctttttgtatcggtaggtttccctttacccccttttcttcttctactctttgggaaacattatatactacttctagtcttaatggttaccacagaaaatagcagtcctatttagctaatacaagacccttggaaagtattatctgttattttcatatttgtgaattaatttcaagtatgtatttgacaagcctttgggatataaaaataaactcaaaaaaacctcacaaataaaaataatctaaaactaaaatgtattagattataacaatgcctactttgtttccacatatttcatcttcattgcattttatttgcatggttttcagacctgatctcttcagctgggataaagttgtcaaaatgtcaccaattgagagacttgaacatgccttcagcaaggctcaaacttatttgggaattgaaaagctgttagatcctgaaggtattgtccagtatttaatttccaccttgattttgctttacagttttgcattcttgaaaagcagtgtttctttgtccttttaaaaatgaattatgagacttgaagaaccttttcctttttggagtataggtgcgagtcattttattactgacacttattaatacttttgtacttagcagtttgtgggatcttttaggtagaaatttaactacagcactggacaatagttaatctaaattaagtaagagttaaagttttaagaaaatgtaattattagataaattcagtatctggttagtccaataaaatgcatttttatgtgagcatcttgcatgtgatgtaaagactttagttataaatgttgcaggattgaattctagacttattttcatagtatgaataaagtctgtatctttatcttaaatggtaacatatggtagcttatctttgaccattttggggaggcttttagggaagactttaaaaaatgagatactgaacaaaaataagtaatcccttttgcctttgtctcatatattatgaagtggcaatttactggtattgcaaagattatatattaggtattgtttatgggtactaaggagagttattttatatctaatattgagcaattcacatattttggacacctaatttaagctggttcttatattcttccacttttagatgttgccgttcagcttcctgacaagaaatccataattatgtatttaacatctttgtttgaggtgctacctcagcaagtcaccatagacgccatccgtgaggtagagacactcccaaggaaatataaaaaagaatgtgaagaagaggcaattaatatacaggtacaggtaacattttattaagatgtttggcttgccgtatttgttttctcctaggtactagataaaaacacttttagagggtttttttcttgactgagaacatcttggtttctcagcttacatttgcataagaagttcagcttagcagttagcattctgtcacatgtgtgtaatagaacaccataactcaatggactttattaagaaggaaaatactttatttcacccagcaaaactgggctgttgctcatgctgctgcatgacatgctgggaatctatgttttcacatcatctggttgccagcttttatttctgtcatgtgctaaagatggtttttctcatatcagcctagttttttttctaagtactaattgtctttctttttttgccattgagaaaagattttttttccattatatatctcacaagggctatcaaaatgtaagccttattttccctttcctttaggaggagtaatgtatggtaaactacttggtgagcttttcatgaagggattacgatgatttcattcatcaggatataaatgaatttttaaagagagaaataaaatcataatttattttcttccttagttctactgtttgaatcaatccatatttaatctcattctgttttagtctagccagtccttgtaattcataagatgagagaatcttaagaattggaccttagaagtcacttggttcaacattctagtgaccaagcaaccaagacatacatgtagatttcaaaattataagaactacatttcagagagaaagaaagcttctctggatggaccttaaattcatcctgttgctacttgttttgggttgttacttaaactctcaatcacagttttgtctgcaaaatgtggttaaaaccaccaacttcataaagataatgaattcaaagtatctaaaatgacattaataaacactcaacaagcaacagctatcattattatcatttttcttcttgatttgttttggcattctcatttaacagatttctttaaaaaatattatttaattcccatattatgatactagtcttgaattgacatagcatcttttttttccatcctctgagattcagagaatttacttattcttttaaattttctttgggtaatatgtacccatccttttatttcccccgtttcaaaaatagtgtgatttatagaaaaagaaaaaaatttactgaaaagaaaggattgagaaatgaggcctgattgtgaacccagggctctcttttgtagtgaatatcaaatgatgctgaggaaaattcctaacttactataattgaaaaaaatgctaggaagtatttgcctctaaaagtatagttattattctacattaatgatgcacctttttagttggctcagatgatcttctgagtttgttacagggttttagattcatttccttattgcattttgttagaaggaggagatattttatttagttcttatagttaagggccttctctcttaaaaaggaaggagacttcatttacttttcatgatgtgtagataaaataatcacttctgtttagggctcagcgtggcatgataagaacttcagaaaacatttgctatttgattaagtgcaagtgtattaacacctcttcatttgcaagctttcattagtgtcttagaggctgaattacgttaattgaaaactaaaatgtgatcaagttttaatcatctctctgacatagcttgccatctgctactctcctaatagtcagacttcttctgccctgttctttctacaaacatacgctggtggtcaatgaataattcctgcatttctctttaaatatccgtcagttgaaagtttcctcatgtgttcgaattaataccgtctgaacatttgtgtttagatagtgccttccttctcgacctcatggatgctggtgcctatctcagtgacctttggctggtcactaactttcctggttcttagaaattc

SEQ ID NO: 237 - DNA, 4052 bp, Homo sapiens
cgccactgcactccagcctgggcaccattgagcgctgagtgaactagactccgtctgcaatcccggcacctcgggaggccgaggctggcggatcactcgcggtcaggagctggagaccagcccggccaacacagcgaaaccccgtctccaccaaaaaaatacgaaaaccagtcaggcgtggtggcgcgcacctgcaattgcaggcactcggcaggctgaggcaggagaatcaggcagggaggttgcagtgagccgagatggcagcagtacagtccagcttcggctcggcatcagagggagaccgtggaaagaggggagggggagggggagggagagggagcgaagttttgaaggaaggtcagaattacttatgtattaaatgtggaagatgaaggagagagaagctggggctggctcccaggtttgtagctggagtacctagttgcagggaggagccatctactgagttggagaagtctgaggaggaacaagctttggaagaaagtaaaggttttgaatatggacatggtttaatatgcctaggaggcgctgaagtagagatgtgaaaatagtgggatatgagagtttggaatccagactcctaggtggttctagatgttctttaaatccaataggagtagatgagattactcagacacagtatacagtggggagaaaaaagagcctagaacttaattttgaggagattcattacttatgagtcagcagctgctgttgaaccagcaggaaaccagggcagtgtcacagaagcagggaaacaagcttctgaaagctcaagttgctcagccttgaggagtgctaccaaggtctgaagcaaggaacgtgggtggccagctctccgggcttacttgggacagttctggtttggatttgttgtttgagcacagttatcatcaaaaatactctagtttgttggttaattatatggtcaccctgaagatgatgctagaaaggtccgtttggcaatgggaaggttattgatgacattggtaaaagccttttcagttgagtcatggggcaaatagcaagttgaagttaaagggaatgttaacaaaccatagctgttaaatacttgagcattttttgtattgttctctatacgtttctgtacatttgaaatattgtacttaaaaatcatgcatgagagttgataaagtagagacagaatgtaggcaagtcttcaagaaatcttgctctgaaagggaacaaaagaactagggagagtcaatttggttataagctcttaaagtatatatggaaatactcagttatttagaaagaggttgatagaaatttattccatgagccctaaaaggccatcagataaaccagagggcaactgcctaagaaaaatacaatcagtacagcagcctgtgtggctgtcttttagtgtctaaaatgcaatgctaaaatgcagttcagcaaaagcaatttacctaagggtcaaggcagaattctcacctttctttttctttaaattacagaaaaggcctaacacgttccagctcctctacgaaactttcctgttttagcctttgttgaactcaaatatcatgccttgttgggaccatggcatttacttttctaatagctgttcttcaatttctgttcagaagtgattcatgtgggttctctgtccctaactatattagaatctccttgagtacagaattcatgagtgcatgctgcttttatactctttgctaccctagtgcacttactcaatgcttctaactcattcatggcagtgcccatttggctcctgagaattggattagtgcctaagacagagtggtgggtactttgggttcgccatacagtgtgagtttgctgaacacctcttgctttgatgattagtgtgggtttttcttggctttgtttttacagagtacagcgcctgaggaggagcatgagagtccccgagctgaaactcccagcactgtcactgaggttgacatggatctggacagctatcagattgcgttggaggaagtgctgacctggttgctttctgctgaggacactttccaggagcaggatgatatttctgatgatgttgaagaagtcaaagaccagtttgcaacccatgaagtaaatatctgtagtttcttagcagggtgtgtcccccacgggacctgagccttaatcagggactctactctcctatttgttatctactgaattctgttctttggaaaggtcaatggtttatttcaggaactgtgatatttaaatagtgctttgtcacaaaattggtatgggtgattaaactgtgcctcagaattagattttagattttagtctccttgtgtgttttggagagccactgatgaaaatcattgcatagtactgctcagttctgaagtgcattgttatatttcaaaagcaaacgagtgaaccaatacaccaaatctttaagatttgagtgttccctaggaaatgattattctttttaattgcatgattaagcaaatgtcatacccagggttcctgtattttttcatatcataaaagtttcctgctcctttgaggacatactatattgcagcatagtgaatttcactatatggagatttcttttggttaaatttttcttttgtatagttatgtgaattgacagatcttatttgttgttttggatagaaaataatataagtggtaatatctcttaaacagttcctcttgggtgagtatggtattttattttatatatatatttatatatataataaataaatatatatttatatataaatatatataaataaaaataaatatatattttattttatatataaataaaatatataaataaatatatataaataaaatatataaatatttttatatataatctatttatatattatatatgtatatgtatatgtgtgtgtatatatatatatttataatttttttttttttaacagagtcttactctgtcacccaggctggagtgcagtggcacaatcttggctcactgcaacttctacctcctggcttcaagtgattctcctgcatcagcctcccaagtagctgggactgcaaacatgtgccaccacgcccggctaattttttgtgtttttagttagagacggggtttcaccttgttgtccaggctggtcttgaactcctggcctaggtgatccacctgcctcagcctcccaaaatgctgggattataggtgtgagccaccacacccagccttttattttatttatttagaattccatgttcatgatctatgagtagcatagtcagcatttactttaaaatagctggtattatcagatgcatcattgcttgctttgagctatttctcttttaacttatggcaggtgtttattcctattttcagagattaaaaaatgtggtcaatgtctattttatttgcgctctactaggctacctttttctgcatcactgacatttaggttaggcattagcaatttgttcagtcttccttttttttttttgcactgagtagctcacaaattataacaatgtccctttctaggcttttatgatggaactgactgcacaccagagcagtgtgggcagcgtcctgcaggcaggcaaccaactgataacacaaggaactctgtcagacgaagaagaatttgagattcaggaacagatgaccctgctgaatgctagatgggaggctcttagggtggagagtatggacagacagtcccggtgagtggaaagccaagaaatgcacttaattccacaggctgctttgcacagttgagctctagtagatgtctgcatgtctgtgaaagcgagatgattacagaacttgccttggaaaagtaagactcttttctacgggtaatattgctggaattctgcatgatctttgtttcccctttgatgtgttagccacaccaaaagataaaagttggaatacagaatttaacaaaaaggaaaaagaggataggcatggtggctcatgcctgtaatcccagcacttgggaggccaacgcggatggatcacttgaggccaggagtttgagaccagcctgggc

SEQ ID NO: 238 - DNA, 4060 bp, Homo sapiens
gtctgcaatcccggcacctcgggaggccgaggctggcggatcactcgcggtcaggagctggagaccagcccggccaacacagcgaaaccccgtctccaccaaaaaaatacgaaaaccagtcaggcgtggtggcgcgcacctgcaattgcaggcactcggcaggctgaggcaggagaatcaggcagggaggttgcagtgagccgagatggcagcagtacagtccagcttcggctcggcatcagagggagaccgtggaaagaggggagggggagggggagggagagggagcgaagttttgaaggaaggtcagaattacttatgtattaaatgtggaagatgaaggagagagaagctggggctggctcccaggtttgtagctggagtacctagttgcagggaggagccatctactgagttggagaagtctgaggaggaacaagctttggaagaaagtaaaggttttgaatatggacatggtttaatatgcctaggaggcgctgaagtagagatgtgaaaatagtgggatatgagagtttggaatccagactcctaggtggttctagatgttctttaaatccaataggagtagatgagattactcagacacagtatacagtggggagaaaaaagagcctagaacttaattttgaggagattcattacttatgagtcagcagctgctgttgaaccagcaggaaaccagggcagtgtcacagaagcagggaaacaagcttctgaaagctcaagttgctcagccttgaggagtgctaccaaggtctgaagcaaggaacgtgggtggccagctctccgggcttacttgggacagttctggtttggatttgttgtttgagcacagttatcatcaaaaatactctagtttgttggttaattatatggtcaccctgaagatgatgctagaaaggtccgtttggcaatgggaaggttattgatgacattggtaaaagccttttcagttgagtcatggggcaaatagcaagttgaagttaaagggaatgttaacaaaccatagctgttaaatacttgagcattttttgtattgttctctatacgtttctgtacatttgaaatattgtacttaaaaatcatgcatgagagttgataaagtagagacagaatgtaggcaagtcttcaagaaatcttgctctgaaagggaacaaaagaactagggagagtcaatttggttataagctcttaaagtatatatggaaatactcagttatttagaaagaggttgatagaaatttattccatgagccctaaaaggccatcagataaaccagagggcaactgcctaagaaaaatacaatcagtacagcagcctgtgtggctgtcttttagtgtctaaaatgcaatgctaaaatgcagttcagcaaaagcaatttacctaagggtcaaggcagaattctcacctttctttttctttaaattacagaaaaggcctaacacgttccagctcctctacgaaactttcctgttttagcctttgttgaactcaaatatcatgccttgttgggaccatggcatttacttttctaatagctgttcttcaatttctgttcagaagtgattcatgtgggttctctgtccctaactatattagaatctccttgagtacagaattcatgagtgcatgctgcttttatactctttgctaccctagtgcacttactcaatgcttctaactcattcatggcagtgcccatttggctcctgagaattggattagtgcctaagacagagtggtgggtactttgggttcgccatacagtgtgagtttgctgaacacctcttgctttgatgattagtgtgggtttttcttggctttgtttttacagagtacagcgcctgaggaggagcatgagagtccccgagctgaaactcccagcactgtcactgaggttgacatggatctggacagctatcagattgcgttggaggaagtgctgacctggttgctttctgctgaggacactttccaggagcaggatgatatttctgatgatgttgaagaagtcaaagaccagtttgcaacccatgaagtaaatatctgtagtttcttagcagggtgtgtcccccacgggacctgagccttaatcagggactctactctcctatttgttatctactgaattctgttctttggaaaggtcaatggtttatttcaggaactgtgatatttaaatagtgctttgtcacaaaattggtatgggtgattaaactgtgcctcagaattagattttagattttagtctccttgtgtgttttggagagccactgatgaaaatcattgcatagtactgctcagttctgaagtgcattgttatatttcaaaagcaaacgagtgaaccaatacaccaaatctttaagatttgagtgttccctaggaaatgattattctttttaattgcatgattaagcaaatgtcatacccagggttcctgtattttttcatatcataaaagtttcctgctcctttgaggacatactatattgcagcatagtgaatttcactatatggagatttcttttggttaaatttttcttttgtatagttatgtgaattgacagatcttatttgttgttttggatagaaaataatataagtggtaatatctcttaaacagttcctcttgggtgagtatggtattttattttatatatatatttatatatataataaataaatatatatttatatataaatatatataaataaaaataaatatatattttattttatatataaataaaatatataaataaatatatataaataaaatatataaatatttttatatataatctatttatatattatatatgtatatgtatatgtgtgtgtatatatatatatttataatttttttttttttaacagagtcttactctgtcacccaggctggagtgcagtggcacaatcttggctcactgcaacttctacctcctggcttcaagtgattctcctgcatcagcctcccaagtagctgggactgcaaacatgtgccaccacgcccggctaattttttgtgtttttagttagagacggggtttcaccttgttgtccaggctggtcttgaactcctggcctaggtgatccacctgcctcagcctcccaaaatgctgggattataggtgtgagccaccacacccagccttttattttatttatttagaattccatgttcatgatctatgagtagcatagtcagcatttactttaaaatagctggtattatcagatgcatcattgcttgctttgagctatttctcttttaacttatggcaggtgtttattcctattttcagagattaaaaaatgtggtcaatgtctattttatttgcgctctactaggctacctttttctgcatcactgacatttaggttaggcattagcaatttgttcagtcttccttttttttttttgcactgagtagctcacaaattataacaatgtccctttctaggcttttatgatggaactgactgcacaccagagcagtgtgggcagcgtcctgcaggcaggcaaccaactgataacacaaggaactctgtcagacgaagaagaatttgagattcaggaacagatgaccctgctgaatgctagatgggaggctcttagggtggagagtatggacagacagtcccggtgagtggaaagccaagaaatgcacttaattccacaggctgctttgcacagttgagctctagtagatgtctgcatgtctgtgaaagcgagatgattacagaacttgccttggaaaagtaagactcttttctacgggtaatattgctggaattctgcatgatctttgtttcccctttgatgtgttagccacaccaaaagataaaagttggaatacagaatttaacaaaaaggaaaaagaggataggcatggtggctcatgcctgtaatcccagcacttgggaggccaacgcggatggatcacttgaggccaggagtttgagaccagcctgggcgacatggcgaaactccgtctctactaaaaatacaaaaattagctgggcatggtgggccat

SEQ ID NO: 239 - DNA, 4055 bp, Homo sapiens
atggcatttacttttctaatagctgttcttcaatttctgttcagaagtgattcatgtgggttctctgtccctaactatattagaatctccttgagtacagaattcatgagtgcatgctgcttttatactctttgctaccctagtgcacttactcaatgcttctaactcattcatggcagtgcccatttggctcctgagaattggattagtgcctaagacagagtggtgggtactttgggttcgccatacagtgtgagtttgctgaacacctcttgctttgatgattagtgtgggtttttcttggctttgtttttacagagtacagcgcctgaggaggagcatgagagtccccgagctgaaactcccagcactgtcactgaggttgacatggatctggacagctatcagattgcgttggaggaagtgctgacctggttgctttctgctgaggacactttccaggagcaggatgatatttctgatgatgttgaagaagtcaaagaccagtttgcaacccatgaagtaaatatctgtagtttcttagcagggtgtgtcccccacgggacctgagccttaatcagggactctactctcctatttgttatctactgaattctgttctttggaaaggtcaatggtttatttcaggaactgtgatatttaaatagtgctttgtcacaaaattggtatgggtgattaaactgtgcctcagaattagattttagattttagtctccttgtgtgttttggagagccactgatgaaaatcattgcatagtactgctcagttctgaagtgcattgttatatttcaaaagcaaacgagtgaaccaatacaccaaatctttaagatttgagtgttccctaggaaatgattattctttttaattgcatgattaagcaaatgtcatacccagggttcctgtattttttcatatcataaaagtttcctgctcctttgaggacatactatattgcagcatagtgaatttcactatatggagatttcttttggttaaatttttcttttgtatagttatgtgaattgacagatcttatttgttgttttggatagaaaataatataagtggtaatatctcttaaacagttcctcttgggtgagtatggtattttattttatatatatatttatatatataataaataaatatatatttatatataaatatatataaataaaaataaatatatattttattttatatataaataaaatatataaataaatatatataaataaaatatataaatatttttatatataatctatttatatattatatatgtatatgtatatgtgtgtgtatatatatatatttataatttttttttttttaacagagtcttactctgtcacccaggctggagtgcagtggcacaatcttggctcactgcaacttctacctcctggcttcaagtgattctcctgcatcagcctcccaagtagctgggactgcaaacatgtgccaccacgcccggctaattttttgtgtttttagttagagacggggtttcaccttgttgtccaggctggtcttgaactcctggcctaggtgatccacctgcctcagcctcccaaaatgctgggattataggtgtgagccaccacacccagccttttattttatttatttagaattccatgttcatgatctatgagtagcatagtcagcatttactttaaaatagctggtattatcagatgcatcattgcttgctttgagctatttctcttttaacttatggcaggtgtttattcctattttcagagattaaaaaatgtggtcaatgtctattttatttgcgctctactaggctacctttttctgcatcactgacatttaggttaggcattagcaatttgttcagtcttccttttttttttttgcactgagtagctcacaaattataacaatgtccctttctaggcttttatgatggaactgactgcacaccagagcagtgtgggcagcgtcctgcaggcaggcaaccaactgataacacaaggaactctgtcagacgaagaagaatttgagattcaggaacagatgaccctgctgaatgctagatgggaggctcttagggtggagagtatggacagacagtcccggtgagtggaaagccaagaaatgcacttaattccacaggctgctttgcacagttgagctctagtagatgtctgcatgtctgtgaaagcgagatgattacagaacttgccttggaaaagtaagactcttttctacgggtaatattgctggaattctgcatgatctttgtttcccctttgatgtgttagccacaccaaaagataaaagttggaatacagaatttaacaaaaaggaaaaagaggataggcatggtggctcatgcctgtaatcccagcacttgggaggccaacgcggatggatcacttgaggccaggagtttgagaccagcctgggcgacatggcgaaactccgtctctactaaaaatacaaaaattagctgggcatggtgggccatgcctgtaatcctagctacttgggaggttgaggtatgaggatcgcttgaactcaggagacagagattgcagtgagctgagattcagccactgcactccagcctgggtaacaaagtgagactgtctccaaaaaaaggaaaagacatttcataggggcagttacttatttgcaatgttaagattagctaaacattaacttggtgtgaagacaggactatggagtattgatctacttttccattttgtgacttttattttaaagctttctcatggtttattttatttcatgtattgtgtcttaaggagcaaactgcattcattgccacttccacctatttaataagcaggaattcctgattgaagaaacaatgattctgatatgaatacagggtgctgctttttgcattctttgtctgcatttaatgaactccatttaggacaaaataaaagtttactttcctggcttctatatttaaagactaaatgctaccttgaatgtttagacaagggtgtcttcccttgccctgtatctccggtgcccagaatgtatatttgactttgcaaagggaaaaggcttgtaggaataatgctgtgttccccacggacaggctgcacgatgtgctgatggaactgcagaagaagcaactgcagcagctctccgcctggttaacactcacagaggagcgcattcagaagatggaaacttgccccctggatgatgatgtaaaatctctacaaaagctgctagaagaacataaagtaaatctgtctcatatttcttcgataccttatcaaatatgaaagagcagcacttagcatctcagaggctgatgacatctatcgttaacatgaagttgggacacttcttcagggttgtcttcatttagcagctcacagggtggaattgatagagatgagacttttctgagccagggataaaagggcacggtaaaattttatatgtgatgtgcagttttcttttgaaagtacatagctttcatacaactggagaagggttcttttggccctctaagtggctaagaacccaagcatgttggcgttcacatggtgtgtgggtgaagagcaaattcttcgtctatgattcaggaaagcgtcaggcattaagttaggaaccaaaattgggtgggcaatttaatttggtcacaagtctaggagataaacttttcatagtcaagataaggaaagatagaataaaatatgctctctgtaaattgaagacttttattgatcagtgaaacattgaggtaactaatatgtaaaactttaggaatacattaaacacaactctgagaagcatttgagaacactattgatagtatttaaataaattttctttctttctttcttttttttgagatggagtcttgctctgtcacccaggctggagggcaatggcaaaatctcagctcactgcaccctctgcctcctgggttcaagtgattctcccacctcagtctcccaagtagctgggactacaggcgtgtgccaccacacccagctaattttttgtattt

SEQ ID NO: 240 - DNA, 4057 bp, Homo sapiens
gtgggttctctgtccctaactatattagaatctccttgagtacagaattcatgagtgcatgctgcttttatactctttgctaccctagtgcacttactcaatgcttctaactcattcatggcagtgcccatttggctcctgagaattggattagtgcctaagacagagtggtgggtactttgggttcgccatacagtgtgagtttgctgaacacctcttgctttgatgattagtgtgggtttttcttggctttgtttttacagagtacagcgcctgaggaggagcatgagagtccccgagctgaaactcccagcactgtcactgaggttgacatggatctggacagctatcagattgcgttggaggaagtgctgacctggttgctttctgctgaggacactttccaggagcaggatgatatttctgatgatgttgaagaagtcaaagaccagtttgcaacccatgaagtaaatatctgtagtttcttagcagggtgtgtcccccacgggacctgagccttaatcagggactctactctcctatttgttatctactgaattctgttctttggaaaggtcaatggtttatttcaggaactgtgatatttaaatagtgctttgtcacaaaattggtatgggtgattaaactgtgcctcagaattagattttagattttagtctccttgtgtgttttggagagccactgatgaaaatcattgcatagtactgctcagttctgaagtgcattgttatatttcaaaagcaaacgagtgaaccaatacaccaaatctttaagatttgagtgttccctaggaaatgattattctttttaattgcatgattaagcaaatgtcatacccagggttcctgtattttttcatatcataaaagtttcctgctcctttgaggacatactatattgcagcatagtgaatttcactatatggagatttcttttggttaaatttttcttttgtatagttatgtgaattgacagatcttatttgttgttttggatagaaaataatataagtggtaatatctcttaaacagttcctcttgggtgagtatggtattttattttatatatatatttatatatataataaataaatatatatttatatataaatatatataaataaaaataaatatatattttattttatatataaataaaatatataaataaatatatataaataaaatatataaatatttttatatataatctatttatatattatatatgtatatgtatatgtgtgtgtatatatatatatttataatttttttttttttaacagagtcttactctgtcacccaggctggagtgcagtggcacaatcttggctcactgcaacttctacctcctggcttcaagtgattctcctgcatcagcctcccaagtagctgggactgcaaacatgtgccaccacgcccggctaattttttgtgtttttagttagagacggggtttcaccttgttgtccaggctggtcttgaactcctggcctaggtgatccacctgcctcagcctcccaaaatgctgggattataggtgtgagccaccacacccagccttttattttatttatttagaattccatgttcatgatctatgagtagcatagtcagcatttactttaaaatagctggtattatcagatgcatcattgcttgctttgagctatttctcttttaacttatggcaggtgtttattcctattttcagagattaaaaaatgtggtcaatgtctattttatttgcgctctactaggctacctttttctgcatcactgacatttaggttaggcattagcaatttgttcagtcttccttttttttttttgcactgagtagctcacaaattataacaatgtccctttctaggcttttatgatggaactgactgcacaccagagcagtgtgggcagcgtcctgcaggcaggcaaccaactgataacacaaggaactctgtcagacgaagaagaatttgagattcaggaacagatgaccctgctgaatgctagatgggaggctcttagggtggagagtatggacagacagtcccggtgagtggaaagccaagaaatgcacttaattccacaggctgctttgcacagttgagctctagtagatgtctgcatgtctgtgaaagcgagatgattacagaacttgccttggaaaagtaagactcttttctacgggtaatattgctggaattctgcatgatctttgtttcccctttgatgtgttagccacaccaaaagataaaagttggaatacagaatttaacaaaaaggaaaaagaggataggcatggtggctcatgcctgtaatcccagcacttgggaggccaacgcggatggatcacttgaggccaggagtttgagaccagcctgggcgacatggcgaaactccgtctctactaaaaatacaaaaattagctgggcatggtgggccatgcctgtaatcctagctacttgggaggttgaggtatgaggatcgcttgaactcaggagacagagattgcagtgagctgagattcagccactgcactccagcctgggtaacaaagtgagactgtctccaaaaaaaggaaaagacatttcataggggcagttacttatttgcaatgttaagattagctaaacattaacttggtgtgaagacaggactatggagtattgatctacttttccattttgtgacttttattttaaagctttctcatggtttattttatttcatgtattgtgtcttaaggagcaaactgcattcattgccacttccacctatttaataagcaggaattcctgattgaagaaacaatgattctgatatgaatacagggtgctgctttttgcattctttgtctgcatttaatgaactccatttaggacaaaataaaagtttactttcctggcttctatatttaaagactaaatgctaccttgaatgtttagacaagggtgtcttcccttgccctgtatctccggtgcccagaatgtatatttgactttgcaaagggaaaaggcttgtaggaataatgctgtgttccccacggacaggctgcacgatgtgctgatggaactgcagaagaagcaactgcagcagctctccgcctggttaacactcacagaggagcgcattcagaagatggaaacttgccccctggatgatgatgtaaaatctctacaaaagctgctagaagaacataaagtaaatctgtctcatatttcttcgataccttatcaaatatgaaagagcagcacttagcatctcagaggctgatgacatctatcgttaacatgaagttgggacacttcttcagggttgtcttcatttagcagctcacagggtggaattgatagagatgagacttttctgagccagggataaaagggcacggtaaaattttatatgtgatgtgcagttttcttttgaaagtacatagctttcatacaactggagaagggttcttttggccctctaagtggctaagaacccaagcatgttggcgttcacatggtgtgtgggtgaagagcaaattcttcgtctatgattcaggaaagcgtcaggcattaagttaggaaccaaaattgggtgggcaatttaatttggtcacaagtctaggagataaacttttcatagtcaagataaggaaagatagaataaaatatgctctctgtaaattgaagacttttattgatcagtgaaacattgaggtaactaatatgtaaaactttaggaatacattaaacacaactctgagaagcatttgagaacactattgatagtatttaaataaattttctttctttctttcttttttttgagatggagtcttgctctgtcacccaggctggagggcaatggcaaaatctcagctcactgcaccctctgcctcctgggttcaagtgattctcccacctcagtctcccaagtagctgggactacaggcgtgtgccaccacacccagctaattttttgtattttttgtatttttagtaaagtcagggtttcaccatgttggccaggctggtcttgaactc

SEQ ID NO: 241 - DNA, 4066 bp, Homo sapiens
tttgtgacttttattttaaagctttctcatggtttattttatttcatgtattgtgtcttaaggagcaaactgcattcattgccacttccacctatttaataagcaggaattcctgattgaagaaacaatgattctgatatgaatacagggtgctgctttttgcattctttgtctgcatttaatgaactccatttaggacaaaataaaagtttactttcctggcttctatatttaaagactaaatgctaccttgaatgtttagacaagggtgtcttcccttgccctgtatctccggtgcccagaatgtatatttgactttgcaaagggaaaaggcttgtaggaataatgctgtgttccccacggacaggctgcacgatgtgctgatggaactgcagaagaagcaactgcagcagctctccgcctggttaacactcacagaggagcgcattcagaagatggaaacttgccccctggatgatgatgtaaaatctctacaaaagctgctagaagaacataaagtaaatctgtctcatatttcttcgataccttatcaaatatgaaagagcagcacttagcatctcagaggctgatgacatctatcgttaacatgaagttgggacacttcttcagggttgtcttcatttagcagctcacagggtggaattgatagagatgagacttttctgagccagggataaaagggcacggtaaaattttatatgtgatgtgcagttttcttttgaaagtacatagctttcatacaactggagaagggttcttttggccctctaagtggctaagaacccaagcatgttggcgttcacatggtgtgtgggtgaagagcaaattcttcgtctatgattcaggaaagcgtcaggcattaagttaggaaccaaaattgggtgggcaatttaatttggtcacaagtctaggagataaacttttcatagtcaagataaggaaagatagaataaaatatgctctctgtaaattgaagacttttattgatcagtgaaacattgaggtaactaatatgtaaaactttaggaatacattaaacacaactctgagaagcatttgagaacactattgatagtatttaaataaattttctttctttctttcttttttttgagatggagtcttgctctgtcacccaggctggagggcaatggcaaaatctcagctcactgcaccctctgcctcctgggttcaagtgattctcccacctcagtctcccaagtagctgggactacaggcgtgtgccaccacacccagctaattttttgtattttttgtatttttagtaaagtcagggtttcaccatgttggccaggctggtcttgaactcctgacctcaagtgatccgcctgccttgggttcccaaagtgctgggattacaggtgtgagccaccatgcccagcctataaattttctatacacatgtatccaatgactatgctcttcccatggaaaaggcgagagaatctaaggtgtccatacttctttaactgctttattgggtagctaatcagagtaacttttgactatcgtgtagcattctacttatctctttatactgtcctacactagataaaatgatctctgacttggtttatttaagctctggacttttttgctttaccacttctacatttttgtattaattcctagtatggacactcaactcctttatgctataaattctgagggagggccagaacttgaataaaagtggtgatatctccatttgcagtctgttataacactgcatcctcaaactgcctttgttgataatggaatgtaaagatgtataataggattagtttcattagtagaacagttagggtaatgattggaaatttaaatatgatgcctcattaactgtccttaattactattgacaactgagtgcgttttaaataggtaaatgtgaaagtagaaataatggtttatcttaatttttttctctagagtttgcaaagtgatcttgaggctgaacaggtgaaagtaaattcactaactcacatggtggtcattgttgatgaaaacagtggtgagagtgctacagctatcctagaagaccagttacaggtaagagtgctgtaaagttggataatcctgagggacctgtggtctgagacccaattacatattgcccttgttcttcatgtcctttctcattctttatccagaagggtagaaaaacctacctttgattgtacttctcagttggggttctacagtgtgtgggctacaggagtacccaggtattgattcctttacttcagctcttggggtgaatggatggggctggttgcagtccccagcttccttgtgcataatgacaagatttggaagcacagtgtattagtccgttttcacactgctgataaagacatacctgagactgggaagaaaaagaggtttaagggacttacagttccatgtggctggggagacctcacaatcatggtggaagggaaggaggagcaagccacattttatatggatggtggcaggcaaagagagggagcttgtgcagggaaactcctttttttaaaaccatcagacctcgtgagacttactcactatcacaagaacagcaagagagagacctgcgcccatgaatcaattacctcccactgggttcctcacttaaaatgtgggaattgtgggagttacaattcaagatgagacttggatggggacacaagcaaaccatatcattccacccctggcctctcccaaatcttatgtcctcacatttcacaaccaatcatgctttcccaacagtacccccaaagtcttaactcatttcagcattaactcaaaagtccacagtccaaagtctcatctgagacaaggcaagtcccttccgcctatgagcctgcaaagtcaaaagcaagttagttacttcctagctacaatgggggcacaggcaaagagtaaatacatctgttccaaatgggagaaactggccaaaacaaaagggctacagtccccattcaagtatggaatacggtggggtagtcaaatcttaaagcttcaaaatgatctcctttgacttcatgtttcacatccaggtcacgcctatgcaagaggtaggttcccatggtcttgggcagtgctgcctctgtggctttgcgggaaatagccccctcctggctgctttcatgggtcagtgttgagtgtctgcggcttttccaggtgcatagtgcaagctgtcagtggatctaccaccctggggtctggaggacagtggccgtcttctcacagctccactaggtggtgccacagtagggactctgtttgggccacatttcccttctgcactgccctagcagaggttctccatgagagccccacctctgcagcaaacttctgcctggacatccacgtgtttccatacatcctctgaaatctaggtggatgttcccaaacctcaattcttgacttctgtgtacccgcaggctcaacaccacatggaagctgccaaggcttgtggcttgcacctttgccatggcctgagctgtacctttgccccttttagtcatggctggagcagctgggatgcagggcaccaagtacctagccacaaggcacggggaccctgagcccagcccacaaaaccattttttcctcctaggcctctgggcttgtgatgggaggggctgatgtgaagacctctgacatgcctggagatgttttccgcattgtcttggtgattaacttttgcctctttgttacttatgcaaatttctgcagccagcttgaatttctcctcagaaaatgagattttcttttctattgcattgtcaggctgcaaatttctcaaacttttatgatctgtttcctttataaaactgaatgcctttaacagcacccaagtcatctcctgaatgctttgctgcttagaaatttcttccacaggtaccctaaattttcccacatttttctgtcttcttctgagctctccaaatgtttccaacctctgcctgttaccgagttccaaagtcacttctacattttagggtatcttttcaacagcaccccactctactgg

SEQ ID NO: 242 - DNA, 4050 bp, Homo sapiens
ttttcccacatttttctgtcttcttctgagctctccaaatgtttccaacctctgcctgttaccgagttccaaagtcacttctacattttagggtatcttttcaacagcaccccactctactggtaccgatttactatattagtccattttcatgctgctgataaaaacatacctgagactgggaagaaaaagaggtttaatggacttacagttccacatcgttggggaggcctcacaatcatggcagaagggaaggaggagcaagtcacgatttacatgcatggtggcaggcaaagagagagagcttgtgcagggaaactcccttttgtaaaaccatcagatctcgtgagacttattcactataatgagaacagcatgggaaagatctgcccccatgcttcaattacctcccaccaagttcctctcaaaaaatgtgagaactgtggtagttataatgcaagatgagatttggatggagacacaggcaaaccatatcacacaggagctgatcttattaagtgatccactgacttcttctcagaagcacttgaggagcttgttaaaatgtagattcctaggctctacccactacctaaatctaggtgagggagggatgcagtgaatttgcaatgtaagaaaaatcatgtgcatagtaaagtttgagaatttcacctagtaggattcaatatctcagtgttttcggtagattaatatgtgaatttcaacaacagttttggaaacctcccaaaattgcttctttttgcacaaaggcaatagtgtatctttacaagtctttaacagataaatttattggtatttcatttgaacaatacttggattttctggtaagacgttgccaatttatttaaatatgatgcctcattaagtgaggcaatccaaactgtaatttcatcacgtgaggtccttttgcttttgtgatatttaaagtcagccagaggttctaagacttgtatgcagtagttagttattataacctgagagctaagtattcatgccttgactatttagcagtaaggaatctgagattcagagaggttaagtagtcctcctgagatttaaatagacaatgagttatcatgctgagactggaaatctatcttctggctcttaagttttctccccctttgtactatgaaaagcttattctcatattaagtatcaaaatagtataatatgaattaaataattcttgttcacatgtatatagtacaaaaataaattttaacatttgttaatcattatttgtaaaattgtaataaaatgattttgggagaaaataatcatgaagagtgattttttataattaataaaatttatttagtattgctgatactagtaagattctattgctaatttatgtaacttatggggaatttttttatggatcacataatgtaaacagaacaaatcatttgatttttttattgtctcataaaaattctcttattcaaaacaggttttataagttaaacatttttcataattttggtaccacagatgaaaattttcttggcatgtaaaagagagttaaggaatataacagacatgctggtttttttagctaaaaatttgaaaaatttgaagcacaaaaagtagatatgtttgttttattttttaataatatgtaaaaatgtcatattctcataaaaaccacaatgaaatagaaagagcaggtttggagtcaaagattcagaggatacagttctattatgttagtttctagctatgtgaaatcatttgttcaattctatggaaattagtttttctgattcatacatttctaggcctagtctgttattttaaagcaatttttataaaaatactttttataagttgttattctataataaagaacaatggaaatcatgaatttcttcaaggattgtgataactctctcttaaggctgtgttgacaaaggatggtttctcctttttctagaaacttggtgagcgctggacagcagtatgccgttggactgaagaacgctggaataggttacaagaaatcaatatattgtggcaggaattattggaagaacaggtatgaaactgttttccataaggggcaaaataaatggtgaaaagtaacccatcttttattgtgactttagaataaagttgccttgtttacttttctttgaaaggaaaatatataaataattattttaaagatcaaatttctatccagtttataactgatcatgaagcttattcacagagattgtgtcatttggctccattaatttgacctgttttcattacttggaatgttagtacttagaagatatgctattttcatgatttgtttgacatcatagttattagtggatttgtgttgggtgatgtatttgaatttgtatcaacacaatgcctagcatataatttgtgctcagtaaataatgagtaatgaatccactcaacacactgtgaactttaattccctagattttttcttgatttttaacaagtattgaaattaatgagaaaatattatttagtcacacctttgatttaacactggattaattgcatattttttccactaagtgttatcacagcaaatgaatctgttgtacaaagctgccaccttaatttttcaataggactggtggctctttgcctgttctctgtctttccagaaaagcaaccattgaaacaaaatacaaataaacaaaacttttctccccaaatgccaaacagttgtggtttaaaaaataagtagatactggccgggcagggtggctcacgcctgtaatcccagcactttgggaggctgaggcaggtggatcacttgaagtcaggagttcaagactagcccggccaacatagtgaaaccccgtctccactaaaaatataaaaataagccaggtgtggcggtgggtgcctgtaatcccagctactcaggaggctgaggcaggagaattgctggaacccaggaggcagaggttgcagtgagccgagactgtgccactgcactccagcctgggagacaagagcgagactccctctcaaaaaaaaaaaaaaaaaagcaaatactctattcccacatctctcagtgtccattttgattcttttaaatgcatttcatttccatctataagaagcaactatattctcttcaggggaaaaaactcaagtgtgtgatgttttgtggcttactaaatatggtggcagatagttgcagaatttgtccaaatataaattgttaatgactacttccccccccgccctcaatctgtggtcagatttttcttattaggaatcacaaaagggacctgattctgatttatgaaatgtttacatttcatgttacaaatatttacatttcactttataaatatttatgtttattgtgaaccttgtatttaggccaaaaagtctcagaatagttaaaattttacttcaataatgacagtagaaaggctgggcgcggtggatcacgcttgtaatcccagcactttgggaggccgaggcgggcagatcacttgaggtcagaccaacatgttgaaacctgtctctactaaaaatgcaaaaaattagccaggcctgcagtgggcacctgtaatcccagccactcaggaggctatggaggcaggagaattgcttgaacccaggaagcagaggttgcagtgatccgagatggcaccactgcactccagtctgggtgacagagtgagactctgtctcaaaaaataaaaataatagtaatagtaataattgcagtagaagacatcgattgctagagaaaaccattgtgttactcttctatccagtaaagtaattgcaaatttggaaataattttaatttgatgataaaaaacagtttaaaaatagagtgctagtatttcagtcacttgtaccactttaggttttaaactgacctttcatcgtgttctataatgatctgacattttaactataccttttgtgtgtgtgtgtgtactgtctacatgttctgtctgatggcatcattatttatgtgcatatcttaccagcctcactagactgaggacagtatccattgggggg

SEQ ID NO: 243 - DNA, 4041 bp, Homo sapiens
aggttgcagtgagccgagactgtgccactgcactccagcctgggagacaagagcgagactccctctcaaaaaaaaaaaaaaaaaagcaaatactctattcccacatctctcagtgtccattttgattcttttaaatgcatttcatttccatctataagaagcaactatattctcttcaggggaaaaaactcaagtgtgtgatgttttgtggcttactaaatatggtggcagatagttgcagaatttgtccaaatataaattgttaatgactacttccccccccgccctcaatctgtggtcagatttttcttattaggaatcacaaaagggacctgattctgatttatgaaatgtttacatttcatgttacaaatatttacatttcactttataaatatttatgtttattgtgaaccttgtatttaggccaaaaagtctcagaatagttaaaattttacttcaataatgacagtagaaaggctgggcgcggtggatcacgcttgtaatcccagcactttgggaggccgaggcgggcagatcacttgaggtcagaccaacatgttgaaacctgtctctactaaaaatgcaaaaaattagccaggcctgcagtgggcacctgtaatcccagccactcaggaggctatggaggcaggagaattgcttgaacccaggaagcagaggttgcagtgatccgagatggcaccactgcactccagtctgggtgacagagtgagactctgtctcaaaaaataaaaataatagtaatagtaataattgcagtagaagacatcgattgctagagaaaaccattgtgttactcttctatccagtaaagtaattgcaaatttggaaataattttaatttgatgataaaaaacagtttaaaaatagagtgctagtatttcagtcacttgtaccactttaggttttaaactgacctttcatcgtgttctataatgatctgacattttaactataccttttgtgtgtgtgtgtgtactgtctacatgttctgtctgatggcatcattatttatgtgcatatcttaccagcctcactagactgaggacagtatccattggggggtgaaatatagaggcaaggaatagttgttaaatatttaattcataaataaaattgctgagaaagaattgattccgttgcaaatacagaaccaagttgttttcctccctactaaatagaaaagggtttccaccctaaatgctacattttgggagaaattatcacaatgtagctacggttgttttccatcccttcttcaggattatctctctacatgactgaatatcctctgcttagaaaacacacattgttgtccaatgaagttgaaaaatctttatatgggctttgggtgctcttcagactccctcctttaatcataattgctgttgaaccttgaatgctagtgtggatttcctacatgatgccatggaaaacactggttttggggtgtggaccctggacccagctctgccattaactatccaagtgatctgggacatgtaacttgacttctctttccttcctttctaaaatgaggggctgggacaagacaatctccgagcttacttctgcctctaggaagttgtaatgtaattcctttggagacttgcatagttggattttcccttttccctccacctatctccttgagaattaggtttagttccctaggtatgaggctaatgtctgattgttctgttacaaatctgagaaggataatattttaaagaaaggtatctttctgggtcatttgtgcctcagacttaggtgtttgaaggccttcttatccccatgtaagggtgaagcctctaataaaataaaagttagaaatttggatgcatgatttaattgaattaccaaatgattttgcagataaagttcaacttttgttattacttgtagtgcttgttgaaagcttggttaaccgaaaaagaagaggctttaaataaagtccagacaagcaacttcaaagaccaaaaggaactaagtgtcagtgttcgacgtctggctgtaagtgatggggttgtcagcatctgtgttgtaagcctatgatatcttaatgttttatagctaatggttagtagaatttagtgaatgcagattacagctcattacctagcattagactgctgccctgtaacaatctggaaccacgagtcttaccttttagcatagtgaactgcaaagcatgtacattttactataaaagatacatgtttaaaatttttggctggggaacagaaagacaaagtcctgttaaaaagagtcatctaataaatatctgaaatactagattttgaaggaagacatggaaatgaagcgtcaaacattggatcagctgagtgagattggccaggatgtgggacaattacttgataattccaaggcatctaagaagatcaacagtgactcagaggaactgactcaaagatgggattctttggttcagagactagaagattcctccaaccaggtactttttgatttggatcatatgttgtgccatgaagtaaacatttaaaatttaaatgttcaggttagttttaatttgtatgaaataaactaaaaagttgtttccttacacctgatgaaaaattgacatgtgaaaatcaccttcagttttctaaagtaagttttaatagattatcttaatatcctataatttaatttatagtaactgattatacttagccaataaataatcttaacatcttaaatcttaagtaatcttattaatcttaaaaatattttaatgaattagtcaaacataaaacattggtttgtagacagatattcttagcagcattatttataatagccaaaaagtggaacaactcaaatatccatacacagatgaatggataaacaaaatgtggtgtatgcatacaatattatctgataatacaaaagaacgaagtattgacacatgctacaacatagatgaaccttgaaaacactatgctaagtataagaagccaatcgcaagattatatacgctatgattccattcataggaaatgtccacaaggggaaaatccacagagatagaaagtaaatgcatggttgccactggtgggagtggggaatggggagtgttggtttatggctatgggatttctttttggggtgataaaatgttctggagacagactgtgaggatgattatacaactgtataaatgtgctaataaccattaaattgtgtatttcaaagaaagaattttatagcatgtgaattacatctcaatgaagctgttataaacattgaaattttggatggcttttatttcaggtgactcaggctgtagcaaagctggggatgtctcagattcctcagaaggaccttttggagactgttcgtgtaagagaacaagcaattacaaaaaaatctaagcaggaactgcctcctcctcctcccccaaagaagagacagatccatgtggatattgaagctaagaaaaagtgagaagagatagagaaattgttcaaatccaatattgcacatactatattttctacttggtgcctattttgtactaatcattaatcataggcaaatctagacataataagtattattattatgaaaagtcaactactgaaccactcactgcccctgtcttctgaatattctacttggcactagctaagcatccaaattttcttggatgattttatttatcctgtgttcaattgggagaactttgtgatcgaagctttctttcttcctttcccattattctccttggaaggatatgattgtccatgactgtctttttattctttctttcactgtcacaactcgacagtgacctcctcagtctttgaatatagcttccccagtttttattgtcagaaagtgcaggggatccttaaccattcctattaacatggtttccagacccttttatatcttctgtctgctctagaaaccactattggtttgccttaaaatggactaccccaataatcgagggccttaaatgactgcttaatgcagtgcctagtttaaaatata

SEQ ID NO: 244 - DNA, 4027 bp, Homo sapiens
aatcacaaaagggacctgattctgatttatgaaatgtttacatttcatgttacaaatatttacatttcactttataaatatttatgtttattgtgaaccttgtatttaggccaaaaagtctcagaatagttaaaattttacttcaataatgacagtagaaaggctgggcgcggtggatcacgcttgtaatcccagcactttgggaggccgaggcgggcagatcacttgaggtcagaccaacatgttgaaacctgtctctactaaaaatgcaaaaaattagccaggcctgcagtgggcacctgtaatcccagccactcaggaggctatggaggcaggagaattgcttgaacccaggaagcagaggttgcagtgatccgagatggcaccactgcactccagtctgggtgacagagtgagactctgtctcaaaaaataaaaataatagtaatagtaataattgcagtagaagacatcgattgctagagaaaaccattgtgttactcttctatccagtaaagtaattgcaaatttggaaataattttaatttgatgataaaaaacagtttaaaaatagagtgctagtatttcagtcacttgtaccactttaggttttaaactgacctttcatcgtgttctataatgatctgacattttaactataccttttgtgtgtgtgtgtgtactgtctacatgttctgtctgatggcatcattatttatgtgcatatcttaccagcctcactagactgaggacagtatccattggggggtgaaatatagaggcaaggaatagttgttaaatatttaattcataaataaaattgctgagaaagaattgattccgttgcaaatacagaaccaagttgttttcctccctactaaatagaaaagggtttccaccctaaatgctacattttgggagaaattatcacaatgtagctacggttgttttccatcccttcttcaggattatctctctacatgactgaatatcctctgcttagaaaacacacattgttgtccaatgaagttgaaaaatctttatatgggctttgggtgctcttcagactccctcctttaatcataattgctgttgaaccttgaatgctagtgtggatttcctacatgatgccatggaaaacactggttttggggtgtggaccctggacccagctctgccattaactatccaagtgatctgggacatgtaacttgacttctctttccttcctttctaaaatgaggggctgggacaagacaatctccgagcttacttctgcctctaggaagttgtaatgtaattcctttggagacttgcatagttggattttcccttttccctccacctatctccttgagaattaggtttagttccctaggtatgaggctaatgtctgattgttctgttacaaatctgagaaggataatattttaaagaaaggtatctttctgggtcatttgtgcctcagacttaggtgtttgaaggccttcttatccccatgtaagggtgaagcctctaataaaataaaagttagaaatttggatgcatgatttaattgaattaccaaatgattttgcagataaagttcaacttttgttattacttgtagtgcttgttgaaagcttggttaaccgaaaaagaagaggctttaaataaagtccagacaagcaacttcaaagaccaaaaggaactaagtgtcagtgttcgacgtctggctgtaagtgatggggttgtcagcatctgtgttgtaagcctatgatatcttaatgttttatagctaatggttagtagaatttagtgaatgcagattacagctcattacctagcattagactgctgccctgtaacaatctggaaccacgagtcttaccttttagcatagtgaactgcaaagcatgtacattttactataaaagatacatgtttaaaatttttggctggggaacagaaagacaaagtcctgttaaaaagagtcatctaataaatatctgaaatactagattttgaaggaagacatggaaatgaagcgtcaaacattggatcagctgagtgagattggccaggatgtgggacaattacttgataattccaaggcatctaagaagatcaacagtgactcagaggaactgactcaaagatgggattctttggttcagagactagaagattcctccaaccaggtactttttgatttggatcatatgttgtgccatgaagtaaacatttaaaatttaaatgttcaggttagttttaatttgtatgaaataaactaaaaagttgtttccttacacctgatgaaaaattgacatgtgaaaatcaccttcagttttctaaagtaagttttaatagattatcttaatatcctataatttaatttatagtaactgattatacttagccaataaataatcttaacatcttaaatcttaagtaatcttattaatcttaaaaatattttaatgaattagtcaaacataaaacattggtttgtagacagatattcttagcagcattatttataatagccaaaaagtggaacaactcaaatatccatacacagatgaatggataaacaaaatgtggtgtatgcatacaatattatctgataatacaaaagaacgaagtattgacacatgctacaacatagatgaaccttgaaaacactatgctaagtataagaagccaatcgcaagattatatacgctatgattccattcataggaaatgtccacaaggggaaaatccacagagatagaaagtaaatgcatggttgccactggtgggagtggggaatggggagtgttggtttatggctatgggatttctttttggggtgataaaatgttctggagacagactgtgaggatgattatacaactgtataaatgtgctaataaccattaaattgtgtatttcaaagaaagaattttatagcatgtgaattacatctcaatgaagctgttataaacattgaaattttggatggcttttatttcaggtgactcaggctgtagcaaagctggggatgtctcagattcctcagaaggaccttttggagactgttcgtgtaagagaacaagcaattacaaaaaaatctaagcaggaactgcctcctcctcctcccccaaagaagagacagatccatgtggatattgaagctaagaaaaagtgagaagagatagagaaattgttcaaatccaatattgcacatactatattttctacttggtgcctattttgtactaatcattaatcataggcaaatctagacataataagtattattattatgaaaagtcaactactgaaccactcactgcccctgtcttctgaatattctacttggcactagctaagcatccaaattttcttggatgattttatttatcctgtgttcaattgggagaactttgtgatcgaagctttctttcttcctttcccattattctccttggaaggatatgattgtccatgactgtctttttattctttctttcactgtcacaactcgacagtgacctcctcagtctttgaatatagcttccccagtttttattgtcagaaagtgcaggggatccttaaccattcctattaacatggtttccagacccttttatatcttctgtctgctctagaaaccactattggtttgccttaaaatggactaccccaataatcgagggccttaaatgactgcttaatgcagtgcctagtttaaaatatatgcttaaaaaatggcagctcatttccacttctcttcccctggtgctgctgtggtggtggtttttaccagctcgcggtacagtggacagtcatttcctagaatgtagacacctgttcctgtgacctgcgatcattgcatcactcttgcccatattgagagcagatgctgactgagtctccaaggtcattggaaacgtgcgatttttagatggccgtctcttctctgaaatattaaatagaaagctgctgttaagatgacaggaggaacatatccctgtttgagcaataccttgaccccagatat

SEQ ID NO: 245 - DNA, 4078 bp, Homo sapiens
tcatttcctagaatgtagacacctgttcctgtgacctgcgatcattgcatcactcttgcccatattgagagcagatgctgactgagtctccaaggtcattggaaacgtgcgatttttagatggccgtctcttctctgaaatattaaatagaaagctgctgttaagatgacaggaggaacatatccctgtttgagcaataccttgaccccagatatttatctagagcatcacaaaatccctcacattttacagggaaaatctaccttgatgaaaagataaaatattcatagttcaccagaaacactttaagcaaagtttctcacaagaatcagcaataacgacttgtgccactgcttaatgtatcgagaagctctgtggggagggtactagttaagaagacagtcttggtttgaatcccagcctcaccctttgttagctttgtgacatgggacagttactgaaaacctctgtgagctcagtaccttcatctctaaaggggataataatagtgtatactttttagggtgctggtgaggattccttgagttaataatagacataaaacacttagaaaggggccgggtagaaggccagcaatcagtgatcgtgactcctcttgttcctccttgctgtggttttgaccaaccttctcaacacctctcaaacctgtcctttcgtcttccttcccactgttactatcttagttgtgactcccgttgctttcacagcctgttctcgactcgtctctctttaatgccttctcctcagtgaacactaaaggataaatagaatcatgtcagttccatgcatagaactctcccttggctctcaactgcctttgggttaagtccaaactccttaatatgtcctgcagggccttcttgtagctggtccatgtgattcttggccacatcgtcaattgtccctcccttgtgagttcagtactcattattccagacacgcctaactaatacttgcagtttgcaaaatgtgatcttccctttctctgctttcccttggcaagggaaactcctcagtgtaatgctgttgttctcctttaggaagccatccatgccccaattggattagaagccactcctgtgaattcctggaattagcacctagcaaattcttttgttattgcctgttactttccattgcttactagactagaagctccttgggagctgagatttgtatctggttcactttcatatcaagagcccagcccagtgcctgacatttagtaaggctcaatcattacatattgaacaaaagaagatgttaactttagtaatgtctgtacttgttctttgctgattatctaaccaactctggtttttattatctataagcatttataaaaatacaagtgattccttataaaggtgaaaattgttttaatatgtaaagttttaaaaatttttatttaaggccaggcatggtgggtcatgactgtaatcacagcactttgggaggccaaggcgggccgatcatgaggtcagcctggccaacatggtgaaactctgtctctactaaaaatacaaaaattagctgggtgtggtggtgggcacctataatcctagctactcgggaggctgaggcaggagaatcctttgaatctggaggcggaggttgcagtgagccgagatcgtgccattgcactcaagcctgggtgacagggcgagactccatctcgaaacaacaacaacaacaacaaattatttaattattttcttcaattgtttattaaccctataatattattactcttttcatacttttagttgtaaatatatgatctcattttgcatggttaccctatttctgggttgctgtttttgggggagtgataaaaagacatattcctgatgagcatttgagttgctctttctggagtcaagtaaaacagtagaaggaaacatgacaaatggtcacctctgaatcttcaaacaggtttgatgctataagtgcagagctgttgaactggattttgaaatggaaaactgccattcagaccacagagataaaagagtatatgaagatgcaagacacttccgaaatgaaaaagaagttgaaggtaaaaaacataaaccacatatatcctagtgcataaaatagttcatcatgctggattttctgctggcataaagacattatggaattcaaaagcctcctgtaaaataaatgtaggcagaaggtagcttttagtacattgtagtgaattttgaatccattcatgctagctgtcatcagatccctatttggaggacgttttttttttttcatctttgtcagtcactgagatgtacagtgaggaatacttcttatggtgatccagttagtggtactactttttagttagtttagatcacccttaatctggtatctaataatttatgactctatattaacattatgctgaagatgttttgccttcggaatacaacaaactattttaaatcaaaaagtgtattcaatatattttctttagagttgtaaaaaataaatacaattaaaaggtgtgggatcttagccctgccgctttccatgcttatgtgtgtttctgaagagtgtgatgggaacttgcagagcttttttgtcctgggtgctcatacgtctcctacacattactgcattaactatttgggcacctgggtagagaatctatagtctagtctcctgccatcttaagaggtagcaaaaaatcaacttgtaaaaagtagataattgcctttttctccagttcgatggtgacttttacattgatctttagttagacaaaataaacggtgtttcttagagtctcttactaatattccttgatctttgactataagaaggttgttctacctagtcacagtaaactttgtgaaaatcaaagtaggatagctgaatttatttgatagcacttacatgtaaacaatttagaattgggattcttctctggattgtctggttgaagtaatatgggttgctcagaagttgtgattgtgttatgatggatactatttgaatagtatataaatatgaataatatataaatatcagttggggatggaggaatgagagaaaattcaaataccgagttgtgtgcacatatagttgtgtttttgtgtgtatacatgattttacttgcttcattcttactagttctggaaagaattttgtcttgggagtatcaaactatagagataaaaaaaataatgaaattaggagccattcctcaacataaagaacaaaatgtgggttgggcttgccatggctcacgcttataattccagcacaaggcaggaggattgcttgagcccaggagtttgagaccagcctgggcaccatagggagacccccgtctctacaaaaagtaaaaaaaaaaaaaaatttgtggggcgtgagcttgcacttgtaactccaactactcgggaggctgagataggaggatcctttgagcccaggaggttgaggctgcagtgagccatgattgtgccactgcaccccagcctgggtgacagagtgacaacctgcctcaaagaaaaaaaaaaaaaaaaggaacaaaatgctttggtttgggttctaaagcatatttactattttcattatttaaaaattatgtatgaaatatgattgtgcttgaagtttgcattgaaccctagacttaatataacccaaacaaataatactgagcctcaaaatatttctatccattttttctgttttctttcttttgagatgggagttttgctctgttgcccaggctggagtgcagtggtgcaatctcggctccctgcaacctctgcctcccgggttcaagcaattctcatgcctaagcctcctgagcagctgggattataggcacacgccaccacgcttggctaatttttgtatttttagtagagttggggtttcaccatgttggccagactggtctcaaactcctgacctctagtgatccacccccctcagccttccaaagtgttgggattacaggtgtgagccaccatgcccagcctatccttttttcttgttagttaatttttgttcaacaacttctgtcataacacattcaattcttttgact

SEQ ID NO: 246 - DNA, 4041 bp, Homo sapiens
taacattatgctgaagatgttttgccttcggaatacaacaaactattttaaatcaaaaagtgtattcaatatattttctttagagttgtaaaaaataaatacaattaaaaggtgtgggatcttagccctgccgctttccatgcttatgtgtgtttctgaagagtgtgatgggaacttgcagagcttttttgtcctgggtgctcatacgtctcctacacattactgcattaactatttgggcacctgggtagagaatctatagtctagtctcctgccatcttaagaggtagcaaaaaatcaacttgtaaaaagtagataattgcctttttctccagttcgatggtgacttttacattgatctttagttagacaaaataaacggtgtttcttagagtctcttactaatattccttgatctttgactataagaaggttgttctacctagtcacagtaaactttgtgaaaatcaaagtaggatagctgaatttatttgatagcacttacatgtaaacaatttagaattgggattcttctctggattgtctggttgaagtaatatgggttgctcagaagttgtgattgtgttatgatggatactatttgaatagtatataaatatgaataatatataaatatcagttggggatggaggaatgagagaaaattcaaataccgagttgtgtgcacatatagttgtgtttttgtgtgtatacatgattttacttgcttcattcttactagttctggaaagaattttgtcttgggagtatcaaactatagagataaaaaaaataatgaaattaggagccattcctcaacataaagaacaaaatgtgggttgggcttgccatggctcacgcttataattccagcacaaggcaggaggattgcttgagcccaggagtttgagaccagcctgggcaccatagggagacccccgtctctacaaaaagtaaaaaaaaaaaaaaatttgtggggcgtgagcttgcacttgtaactccaactactcgggaggctgagataggaggatcctttgagcccaggaggttgaggctgcagtgagccatgattgtgccactgcaccccagcctgggtgacagagtgacaacctgcctcaaagaaaaaaaaaaaaaaaaggaacaaaatgctttggtttgggttctaaagcatatttactattttcattatttaaaaattatgtatgaaatatgattgtgcttgaagtttgcattgaaccctagacttaatataacccaaacaaataatactgagcctcaaaatatttctatccattttttctgttttctttcttttgagatgggagttttgctctgttgcccaggctggagtgcagtggtgcaatctcggctccctgcaacctctgcctcccgggttcaagcaattctcatgcctaagcctcctgagcagctgggattataggcacacgccaccacgcttggctaatttttgtatttttagtagagttggggtttcaccatgttggccagactggtctcaaactcctgacctctagtgatccacccccctcagccttccaaagtgttgggattacaggtgtgagccaccatgcccagcctatccttttttcttgttagttaatttttgttcaacaacttctgtcataacacattcaattcttttgactcaaaccattatttttatggcatggcgtactcagggtatgtatgtgaatagatatcctggatctaaaacataattttaattatttccttctaataggagcttataattatgaggtacattttttttcttacaaaagaaaccaatgctttttagttgctatgattacgtttgaatttaccttttcagatttaaaaagaatgtaggagggccattcaacttaaacatttaaaacagcaacattatattgagaagaaagtttgcaatattcttatgttgggacttcatttgcaggcattagaaaaagaacagagagaaagaatccccagagcagatgaattaaaccaaactggacaaatccttgtggagcaaatgggaaaaggtaagatccttgatttttttcccctatatttttcagatggtggcatcgaataatattacagtttgccctattaaatattttgctttaatactcgaatcctcttttggctagataaatggttttcaaaaatgtttttaggcagcagaatctttaaaaatgaaattttattctgaagctgattgtaaaaaagcagataaaagcaaagttgttctgattttatatggggtcggggctggataccctgattagcagaacagttaaaacccactagcatagtatattttaaaactgtatcctttgggtttatatattgggaatttgtttgcagggtggtagcaaaagaaaactttacttggcaacatttgggaaacgaagttacgttaaattcattaagggtatttgatttttgataacttttaatgcattatatttatttactacagtatttttatagttaagtttgataaggtgttacttatatatgaaatttttaaatgctcccaagacttttttttttgctgtagctcccagtgactcagaataagctaaagattaatattcttgatgtgcagttttgcatatgaatctctctttgttctagagaaatgttgaaagacatttcttgcactccatgtacgttggtctaataatggtaagcactttggaaggctgctgtagctctccttgacacctgtacagatacctatacagaattaggaatattagtttgacaagaatcttaaaagcagtagcatttaattttttattgtttgactttttgttatggaaaatataactgtataaaagcaaatagaatactataatgaacttccttgtatcagttacctagtttagtaattgacaatattctgccattcttgaattatctatacctttactcgttcctcagcctctcaattattactatttttacagttttcttggaagtaaaatttacttacattgaaatacatgacttagctgtgctgttttgacaaatagatatacctgtgtaacctacacacacacatcactgtagaaaatttccatctttccagaaatttctcttttgggttagtcaccttcctccctccagaaaacaactgttcatgttgttttgaccttagattattttgcctccagcctttaacaaatatgtttatttatttagtatgtatactggatatgtgtatacacacacacacacaaacacacagaaacatatatacacacacaaacatatatagatatatacacatacacacaaaatatggaatgtataccatgtggacagtgtatgtccatttattttgaaattatgcaaatgtattatcaatccatttattattaataaatgttaatttctttctttaaataaattaaatagaatagtatttaatattttctttcaaaatccattctagcagattgtcttagttgtccttcctgtgggcatcccacttggaggttactctttccagtatttacttgaagagatccagagacacaaacagatgataacttcccttgagattcattcaataattataatgcattggatgttgaatttatttcctttacaagcatagattttttacttctacctcagcattgtacctggtgactctgactttatctgatgtgaatatgggataatttcttgaatctgtgtactgaatttactcccatttctgtcaggttttcagcagtgtggcagaattatgaagatgggggagacttgatgtagatgagaagttggtgcgaggtgatgttatagtgagaataacagtgattgggggaatgggcaaacttggattctcctgtccttttctagtttcttatccttgggaaagtcttggaacccttgtttctttgccttggtgtctggaaaatgagggagtttattagctgactcttagctgttagtttatcaggtgactattagtttattagctgactataggctttggtccataaaattctaccataaatgggt

SEQ ID NO: 247 - DNA, 4046 bp, Homo sapiens
tcatctagtaaaatacagtagagtagttgggcatctggataatgtggctttatgaatcaatgcccattgtggttgcctaagcatataagcccaggaagtttggtgaaggtcctatgttttgtaaacgtttcccttgattccaatagtgatagactgagaagtgtaaagtcaagtgagactgagtggcaggaatgtgttctatgttctcccttttagacaattaataaagtgatcttctgttgattttgccttttgactagtcaccttctaagaactctgtgttttatagaaatagaaaattttaaactctggatctctgggagtaaaacaactatttttaaagacaatgtgcagttttccttttataagatgtaaattgtgtttgaatcattaccgggcatcactgtaaccagcaatatctcaggattagagaaagggagattcagatgtttaaaattggtttaaagaggcaaaatgaatggcttgtaagacattgtcagtgaaaaaataactgaagttgttttaaccgcccttgttcttgaagtgagcacctctttccagttttctagatgagtagtggtaattttccatctcagaaattttatttacctacttaattttcttccttgattagtatgaattgtccaacataaagatgatgtggctggtgttactattcctttgcctgcctagaatagaaatgatggggcaggggcatgacccatatctccattgttcatattgttaggaaaatggtgatttgttttgtatactctccccattaacaggggtaatgcagcatggcttgtggtgtgaatgctttgcttatgtctcatattctcttacctgagagatggtggtgaacagtgaacttctgcaattgacataggtgacacattcaaatgacagcatgatatgccctcatttatgattttcagtagacacagtgtattataaaaattttcaaagttgcattgtctgtggatcatacatgactttttgtttttatgcctttgttttttagttcaagctctcattatcctggattttgatcatatatgtttataaagcaggattgttttattgctttcctactcaataaaaatgtgaagccatccttttggtatgcatgttttcctccgaatagaaagattcctttgaagatttcccatactttttcatagtcattttagaggatttgaaggtattttagattaagggaaggactatgataaaacctattattatatatgactttattatttttaggaacattctctacttttcaaaaatatcggacaaataaaatgataagatttcagtaataaaaatggtggcattgttttccctgatgtgtttctaaagtagatcatcttattgctgcctcagtcttttggtatttgcttatttatgtgcaaggtctccagtgggcttgctgatgcttctagagcctggctgctggcttaatattcctgcactcaccaggttgcttcccagcataaggcatcctcgccattcattttttaatttatatgacactgtgctttggtcaccaagacctgagctgcctcctagtttttctagccagctttctttttttcttaggacaaagggtcttctttctgaagtcgggcctagacagatcaaggtagttgatcttatttcactggttcaggtgataaactagcagagtagaagcatggcatggatggaaacatatattatctagaaaaggcagtggctgaagttctactgatgtgcctgaatcgttattttaaaatgtctttcttctttgttcaaggaattgaaataaacatcattatttttaagtgcatcattataaatttttgttgttgtattaaaagggacttaagaaagtgatcattatgtgtgacattgcctcactattctgagtgttagaatgttcagaataaattcaagacacattttgtaatatatagactgtttgcttgtttttcatgtctgcatagaaggccttcctactgaagaaataaaaaatgttctggagaaggtttcatcagaatggaagaatgtatctcaacatttggaagatctagaaagaaagattcagctacaggaagatataaatgcttatttcaagcagcttgatgagcttgaaaaggtcatcaagacaaaggaggagtgggtaaaacacacttccatttctgaatcttcccggcagtccttgccaagcttgaaggattcctgtcaggtaaggagccaacggtctggaaagtggaggaattctatgtgcagttccagagttaaggagggcttctcgtatcatgaactttaagttaatgctgccctgattaacttcctgtgaggatgttcatcttcagtgagttgtgtgaccgtattttctcttccttagcgggaattgacaaatcttcttggccttcaccccaaaattgaaatggctcgtgcaagctgctcggccctgatgtctcagccttctgccccagattttgtccagcggggcttcgatagctttctgggccgctaccaagctgtacaagaggctgtagaggatcgtcaacaacatctagagaatggtaaacccaacaattttaaaatctcctgtctcagtttgccttaatgtaaacatgactcccaacatttagaacttgagtacacttgcttgctttgcaccaaccttctccattttcctttgtgcctgtattgttcaaagtcttaaagtcttctgtattcagattcttttccagattcacacctttttgtaaacatacaagcaagtttcacattctctaaaattgtgtcagtaggatataataataatttttttttttgtagctacaggatctcactctgtcacccaggctggagagcagtggtgcaatcatagctgcagtcttgacctcctgggtttcagtggtccttctgcctcagcctactgagtagctgggactacaggcatgcaccaccatgcctggctggttttttatttttagtagagccagggtctagctatgttgcccacgctggtctagaactcctgggctcaagtgatcttcccacctcagcctcccaaaataacaggtgtaagccattataacaggtgatataacagcctcccaaaataacaggtgttaggcaaaataacagatgttagcctcccaaaataccagggataacaggtgtcagccattgtacctgacctggatataatgatttttaaagattttttttttttttttttttgagaaacaggtgcaatttcttcctttggttgaggaggccacttaatatcattgctaggaggatcaaaatgaatgatcccttacttctgtttcctcaaaatagttaaagttttggcagtctcatactgtcttttaaaagaaatcatattccactgtcagattcagaaaaattttagagttcttacttttggaatacacttggttttggaaggttcactgttaaagattttgaaagctcatccctcctacgttacactatttacttcctagctgccatttgagttaggaactgtgttgcattgtgcattattttgtgaaatgcattgagcattgtgtgaaatgctccacatgtaacccagcctaacttcagcaattgtagattgtgtgatgactggaagtgtctgtatgtgtgcatgctaggcaaatgtgtcgtattgcctttcttctgaaagtgcatctggacagcatgtctttgttccttgaattcagttatgtgaaatatgtctttgagggtacctctttctccacttattggtacaagctgtgctttcacttttgacaaggatcagtaggcagtttaacttttgctgctagttggtttcacctctttgtgcttcaagagaactcacttcctttccacgcaagtgttacttctgtgatatttttacattagtgactgaggtagacactgttccagctggctgttcagtcattatttctcagggtacctgggcagcatggtggcagtatttccatataatctcctccactctggacctgggtttgtctacacggtggagctta

SEQ ID NO: 248 - DNA, 4044 bp, Homo sapiens
tatgttttgtaaacgtttcccttgattccaatagtgatagactgagaagtgtaaagtcaagtgagactgagtggcaggaatgtgttctatgttctcccttttagacaattaataaagtgatcttctgttgattttgccttttgactagtcaccttctaagaactctgtgttttatagaaatagaaaattttaaactctggatctctgggagtaaaacaactatttttaaagacaatgtgcagttttccttttataagatgtaaattgtgtttgaatcattaccgggcatcactgtaaccagcaatatctcaggattagagaaagggagattcagatgtttaaaattggtttaaagaggcaaaatgaatggcttgtaagacattgtcagtgaaaaaataactgaagttgttttaaccgcccttgttcttgaagtgagcacctctttccagttttctagatgagtagtggtaattttccatctcagaaattttatttacctacttaattttcttccttgattagtatgaattgtccaacataaagatgatgtggctggtgttactattcctttgcctgcctagaatagaaatgatggggcaggggcatgacccatatctccattgttcatattgttaggaaaatggtgatttgttttgtatactctccccattaacaggggtaatgcagcatggcttgtggtgtgaatgctttgcttatgtctcatattctcttacctgagagatggtggtgaacagtgaacttctgcaattgacataggtgacacattcaaatgacagcatgatatgccctcatttatgattttcagtagacacagtgtattataaaaattttcaaagttgcattgtctgtggatcatacatgactttttgtttttatgcctttgttttttagttcaagctctcattatcctggattttgatcatatatgtttataaagcaggattgttttattgctttcctactcaataaaaatgtgaagccatccttttggtatgcatgttttcctccgaatagaaagattcctttgaagatttcccatactttttcatagtcattttagaggatttgaaggtattttagattaagggaaggactatgataaaacctattattatatatgactttattatttttaggaacattctctacttttcaaaaatatcggacaaataaaatgataagatttcagtaataaaaatggtggcattgttttccctgatgtgtttctaaagtagatcatcttattgctgcctcagtcttttggtatttgcttatttatgtgcaaggtctccagtgggcttgctgatgcttctagagcctggctgctggcttaatattcctgcactcaccaggttgcttcccagcataaggcatcctcgccattcattttttaatttatatgacactgtgctttggtcaccaagacctgagctgcctcctagtttttctagccagctttctttttttcttaggacaaagggtcttctttctgaagtcgggcctagacagatcaaggtagttgatcttatttcactggttcaggtgataaactagcagagtagaagcatggcatggatggaaacatatattatctagaaaaggcagtggctgaagttctactgatgtgcctgaatcgttattttaaaatgtctttcttctttgttcaaggaattgaaataaacatcattatttttaagtgcatcattataaatttttgttgttgtattaaaagggacttaagaaagtgatcattatgtgtgacattgcctcactattctgagtgttagaatgttcagaataaattcaagacacattttgtaatatatagactgtttgcttgtttttcatgtctgcatagaaggccttcctactgaagaaataaaaaatgttctggagaaggtttcatcagaatggaagaatgtatctcaacatttggaagatctagaaagaaagattcagctacaggaagatataaatgcttatttcaagcagcttgatgagcttgaaaaggtcatcaagacaaaggaggagtgggtaaaacacacttccatttctgaatcttcccggcagtccttgccaagcttgaaggattcctgtcaggtaaggagccaacggtctggaaagtggaggaattctatgtgcagttccagagttaaggagggcttctcgtatcatgaactttaagttaatgctgccctgattaacttcctgtgaggatgttcatcttcagtgagttgtgtgaccgtattttctcttccttagcgggaattgacaaatcttcttggccttcaccccaaaattgaaatggctcgtgcaagctgctcggccctgatgtctcagccttctgccccagattttgtccagcggggcttcgatagctttctgggccgctaccaagctgtacaagaggctgtagaggatcgtcaacaacatctagagaatggtaaacccaacaattttaaaatctcctgtctcagtttgccttaatgtaaacatgactcccaacatttagaacttgagtacacttgcttgctttgcaccaaccttctccattttcctttgtgcctgtattgttcaaagtcttaaagtcttctgtattcagattcttttccagattcacacctttttgtaaacatacaagcaagtttcacattctctaaaattgtgtcagtaggatataataataatttttttttttgtagctacaggatctcactctgtcacccaggctggagagcagtggtgcaatcatagctgcagtcttgacctcctgggtttcagtggtccttctgcctcagcctactgagtagctgggactacaggcatgcaccaccatgcctggctggttttttatttttagtagagccagggtctagctatgttgcccacgctggtctagaactcctgggctcaagtgatcttcccacctcagcctcccaaaataacaggtgtaagccattataacaggtgatataacagcctcccaaaataacaggtgttaggcaaaataacagatgttagcctcccaaaataccagggataacaggtgtcagccattgtacctgacctggatataatgatttttaaagattttttttttttttttttttgagaaacaggtgcaatttcttcctttggttgaggaggccacttaatatcattgctaggaggatcaaaatgaatgatcccttacttctgtttcctcaaaatagttaaagttttggcagtctcatactgtcttttaaaagaaatcatattccactgtcagattcagaaaaattttagagttcttacttttggaatacacttggttttggaaggttcactgttaaagattttgaaagctcatccctcctacgttacactatttacttcctagctgccatttgagttaggaactgtgttgcattgtgcattattttgtgaaatgcattgagcattgtgtgaaatgctccacatgtaacccagcctaacttcagcaattgtagattgtgtgatgactggaagtgtctgtatgtgtgcatgctaggcaaatgtgtcgtattgcctttcttctgaaagtgcatctggacagcatgtctttgttccttgaattcagttatgtgaaatatgtctttgagggtacctctttctccacttattggtacaagctgtgctttcacttttgacaaggatcagtaggcagtttaacttttgctgctagttggtttcacctctttgtgcttcaagagaactcacttcctttccacgcaagtgttacttctgtgatatttttacattagtgactgaggtagacactgttccagctggctgttcagtcattatttctcagggtacctgggcagcatggtggcagtatttccatataatctcctccactctggacctgggtttgtctacacggtggagcttacagcaagactggttgaagggatctttgttttcttttattctttgtgtagctgttaaggaagaggagattatatggaacaaaagggacattgttgttccatcttcagagag

SEQ ID NO: 249 - DNA, 4046 bp, Homo sapiens
ataagatgtaaattgtgtttgaatcattaccgggcatcactgtaaccagcaatatctcaggattagagaaagggagattcagatgtttaaaattggtttaaagaggcaaaatgaatggcttgtaagacattgtcagtgaaaaaataactgaagttgttttaaccgcccttgttcttgaagtgagcacctctttccagttttctagatgagtagtggtaattttccatctcagaaattttatttacctacttaattttcttccttgattagtatgaattgtccaacataaagatgatgtggctggtgttactattcctttgcctgcctagaatagaaatgatggggcaggggcatgacccatatctccattgttcatattgttaggaaaatggtgatttgttttgtatactctccccattaacaggggtaatgcagcatggcttgtggtgtgaatgctttgcttatgtctcatattctcttacctgagagatggtggtgaacagtgaacttctgcaattgacataggtgacacattcaaatgacagcatgatatgccctcatttatgattttcagtagacacagtgtattataaaaattttcaaagttgcattgtctgtggatcatacatgactttttgtttttatgcctttgttttttagttcaagctctcattatcctggattttgatcatatatgtttataaagcaggattgttttattgctttcctactcaataaaaatgtgaagccatccttttggtatgcatgttttcctccgaatagaaagattcctttgaagatttcccatactttttcatagtcattttagaggatttgaaggtattttagattaagggaaggactatgataaaacctattattatatatgactttattatttttaggaacattctctacttttcaaaaatatcggacaaataaaatgataagatttcagtaataaaaatggtggcattgttttccctgatgtgtttctaaagtagatcatcttattgctgcctcagtcttttggtatttgcttatttatgtgcaaggtctccagtgggcttgctgatgcttctagagcctggctgctggcttaatattcctgcactcaccaggttgcttcccagcataaggcatcctcgccattcattttttaatttatatgacactgtgctttggtcaccaagacctgagctgcctcctagtttttctagccagctttctttttttcttaggacaaagggtcttctttctgaagtcgggcctagacagatcaaggtagttgatcttatttcactggttcaggtgataaactagcagagtagaagcatggcatggatggaaacatatattatctagaaaaggcagtggctgaagttctactgatgtgcctgaatcgttattttaaaatgtctttcttctttgttcaaggaattgaaataaacatcattatttttaagtgcatcattataaatttttgttgttgtattaaaagggacttaagaaagtgatcattatgtgtgacattgcctcactattctgagtgttagaatgttcagaataaattcaagacacattttgtaatatatagactgtttgcttgtttttcatgtctgcatagaaggccttcctactgaagaaataaaaaatgttctggagaaggtttcatcagaatggaagaatgtatctcaacatttggaagatctagaaagaaagattcagctacaggaagatataaatgcttatttcaagcagcttgatgagcttgaaaaggtcatcaagacaaaggaggagtgggtaaaacacacttccatttctgaatcttcccggcagtccttgccaagcttgaaggattcctgtcaggtaaggagccaacggtctggaaagtggaggaattctatgtgcagttccagagttaaggagggcttctcgtatcatgaactttaagttaatgctgccctgattaacttcctgtgaggatgttcatcttcagtgagttgtgtgaccgtattttctcttccttagcgggaattgacaaatcttcttggccttcaccccaaaattgaaatggctcgtgcaagctgctcggccctgatgtctcagccttctgccccagattttgtccagcggggcttcgatagctttctgggccgctaccaagctgtacaagaggctgtagaggatcgtcaacaacatctagagaatggtaaacccaacaattttaaaatctcctgtctcagtttgccttaatgtaaacatgactcccaacatttagaacttgagtacacttgcttgctttgcaccaaccttctccattttcctttgtgcctgtattgttcaaagtcttaaagtcttctgtattcagattcttttccagattcacacctttttgtaaacatacaagcaagtttcacattctctaaaattgtgtcagtaggatataataataatttttttttttgtagctacaggatctcactctgtcacccaggctggagagcagtggtgcaatcatagctgcagtcttgacctcctgggtttcagtggtccttctgcctcagcctactgagtagctgggactacaggcatgcaccaccatgcctggctggttttttatttttagtagagccagggtctagctatgttgcccacgctggtctagaactcctgggctcaagtgatcttcccacctcagcctcccaaaataacaggtgtaagccattataacaggtgatataacagcctcccaaaataacaggtgttaggcaaaataacagatgttagcctcccaaaataccagggataacaggtgtcagccattgtacctgacctggatataatgatttttaaagattttttttttttttttttttgagaaacaggtgcaatttcttcctttggttgaggaggccacttaatatcattgctaggaggatcaaaatgaatgatcccttacttctgtttcctcaaaatagttaaagttttggcagtctcatactgtcttttaaaagaaatcatattccactgtcagattcagaaaaattttagagttcttacttttggaatacacttggttttggaaggttcactgttaaagattttgaaagctcatccctcctacgttacactatttacttcctagctgccatttgagttaggaactgtgttgcattgtgcattattttgtgaaatgcattgagcattgtgtgaaatgctccacatgtaacccagcctaacttcagcaattgtagattgtgtgatgactggaagtgtctgtatgtgtgcatgctaggcaaatgtgtcgtattgcctttcttctgaaagtgcatctggacagcatgtctttgttccttgaattcagttatgtgaaatatgtctttgagggtacctctttctccacttattggtacaagctgtgctttcacttttgacaaggatcagtaggcagtttaacttttgctgctagttggtttcacctctttgtgcttcaagagaactcacttcctttccacgcaagtgttacttctgtgatatttttacattagtgactgaggtagacactgttccagctggctgttcagtcattatttctcagggtacctgggcagcatggtggcagtatttccatataatctcctccactctggacctgggtttgtctacacggtggagcttacagcaagactggttgaagggatctttgttttcttttattctttgtgtagctgttaaggaagaggagattatatggaacaaaagggacattgttgttccatcttcagagagacatttcatcatgaagaaatgaagaaaaattatagtgggttagttaatatttcaaacgtcaacatccgcaggaatgaagtcactgtctgactctcagaaatgccaatggaatgatctatgttgttaattaacagagacccttttacattttaatcatggggtctcctttgccatgtattggaattcatttaggataatggtctatgtaataatattggttcctaatatgattttttcaaactaaatatttttaa

SEQ ID NO: 250 - DNA, 4054 bp, Homo sapiens
ggtacctgggcagcatggtggcagtatttccatataatctcctccactctggacctgggtttgtctacacggtggagcttacagcaagactggttgaagggatctttgttttcttttattctttgtgtagctgttaaggaagaggagattatatggaacaaaagggacattgttgttccatcttcagagagacatttcatcatgaagaaatgaagaaaaattatagtgggttagttaatatttcaaacgtcaacatccgcaggaatgaagtcactgtctgactctcagaaatgccaatggaatgatctatgttgttaattaacagagacccttttacattttaatcatggggtctcctttgccatgtattggaattcatttaggataatggtctatgtaataatattggttcctaatatgattttttcaaactaaatatttttaaataaacagaactgaagggccaacctggacatgcatatctggaaacattgaaaacactgaaagatgtgctaaatgattcagaaaataaggcccaggtgtctctgaatgtccttaatgatcttgccaaggtggagaaggccctgcaagaaaaaaaggtaacatatatcttccatgttagaactctagcgcttcttctaatatctcctcttacatattttgaaatgttttttcagagattaaaaaaaaagttggtcagttttgttcatcattggtgcaaaaatgtgtttatgatttgagggttagtttgacctcacataaaagaaagtacagttattaaaaattttttcatagaagaaaagcatattttctccttctgctgtgattagcttaaaattctcaacctgttcataaaatctgctaaaatatctttatgaaatgaggactatcagttgacgtgttgatgtatacttttttctgcatcgaataggaatgtttccgaggtcatttagttgagtagccttatggctctgtgctattagatgaaaaggagagcagccattgagcactgcacacttggcccacactgggtttgctgttcccttggtttttagggttgagaatacactgtattgcccacacacaactcatgaagaaaaagctttaatttttatgattatgcctatttttttcatgagtttttcatgttttgttttgttttgttttttgatttccaacttttattttaagttcaggggtacttgtgcaggatgtgcaggtttgttaaatgggtaaacgtgtgtcatggtagtttgctgcactacgtattaagcccagcatccattagctcttcttcctgatgctttccctcccaccatgccccaccctccaacagaccccagtgtgtgtttttccccaccatgtgtccgtatgttctcattattcagctcccacttataagtgagaatatgcggtatttttttttgttgtttctgaattagtttgccgaggataatggcttccagctccatccatatacctgcaaaggacatgatcttgttcctttttatggctgcatagtattccatggttgatatgtaccacattttctttaagtagtctatcattgatgggcatttgggttgattccttgtccttgctattgtgaattgtgctgcaatgaacatagtgtgcatatatctttataacagaatgatttgtattcctttgggtatatacccagtgagattgctgggtcaaatggcatttctggttttaggtctttgaggaatcaccacactgtcttccacagtggttgaactaattcacactcccacccactgttctttttagataaaaatgctttctaatgcattttaaagtgacttttgactttatatagcccattttactatatctgtgcagacacatttttgtgcatatttttaatcttttaaaactttttccagacccttgatgaaatccttgagaatcagaaacctgcattacataaacttgcagaagaaacaaaggctctggagaaaaatgttcatcctgatgtagaaaaattatataagcaagaatttgatgatgtgcaaggaaagtggaacaagctaaaggtcttggtttccaaagatctacatttgcttgaggaaattgctctcacactcagagcttttgaggtaaatccagaggccactgggagtttaagtttattacggggtaaatagtaattatcttataagattcacgtatttattatttaaatattttacattctttctagatccccatttattatgtatttaagttgggacttatcaaagatgtacttttaatgtgctagagagcacatttatttccttttgcctggaagcaaagtcaaaagtagagtaaactggaccttgaagataagagaaaattgcttaaaaatggtcaaaataatgtttcaggcatggagggcctgtgtgaaatacagactgttgattagattatagtagtaacttggttggggtggtagaaatagcccaggtagtagtaaattgctgaatacatgaaactactttttgcaggtttttgacatttgaagtcaaaagtcagagataggccattgacagtgtcagagtgggaaggcaaatcgttccagggacatgaaaattcagaaacaggatccttcactacacctgaaaatgttgacagatgcagcagtgataaagtttaagaggaaaggataaatgtgaggatgtataaggagagagtcaatgtcaatagaagtcagtgtcagattttaacattctgcctgtgagaaagatggagaagcagagtttccaggtcacctggtattttaataggaaagttctgggtggagaatgaaccaatcacactctctccctgcaaggcttcctatcctccagtgactccttaccttggtctttttttttttttttccccatcagtcagggatctttgtcttttttaaatttcttattcaccgatgtatgccaagatgtactcataactagagcaatgcctggcacagagaaggcatccaatcaatatttttcaacgaatgaaatgaaattagcaataggagatttagatttggatatatctctgtatatctatctatctatatatatagatagatagattctcttggaagctaaatccaaatatgtgtagatatatatctatatatatagggagatgtctctgtatatatgcatatacatctttatttatatagagagaatctaaatccgaatctatatatatttagatgtagatccaaatatatgtagatacaatatatatatctacatatatttggatctacatctaaatattatatctacatatatttggatctagatctaaatatatatagatttggatttagatgctaagcaaatttgcataaggaatattgcccccaaaaagtgaaaagattgaaagcgaagacaaaaattaatgaaaatgtatgttttgaaaatcaaagtcagagaacacgtggtagaagaggagctggaagacctcacagattagtgtggaagggatccagccagattctctgagtggaccactgaatttggaggggcgttctttgactcaggaactaatgggtagttccaatgaatgatcagcagaagatacagatggaggggttgtgtgtgtgtgtgggtagctgtgtgtgatggtagtgacaggaggtagtttttctctaggtgtaagtgcagttctagatggagatctcattcaaataaaccagtaattatggagagaaatgtgttttgtgtggcttagtgtttttgactcatttacttttttttttttgagatggagtcttgctctgttgccccaggctggagtgccatggtgcaatcttggcttactgcaacttcagcctcccgggttcaagcagttctcctgcctcagcctcctgattaactgggactacaggcacatgccactatgcccggctaaggttttatttttagtagagatgaggttttaccatgttggccaggctggtctcaaactcctgacctcaggtgatccaccctcctcggcctcccaaaatgctaggattacagacatgagccaccatgcctgg

SEQ ID NO: 251 - DNA, 4062 bp, Homo sapiens
ctgggtttgtctacacggtggagcttacagcaagactggttgaagggatctttgttttcttttattctttgtgtagctgttaaggaagaggagattatatggaacaaaagggacattgttgttccatcttcagagagacatttcatcatgaagaaatgaagaaaaattatagtgggttagttaatatttcaaacgtcaacatccgcaggaatgaagtcactgtctgactctcagaaatgccaatggaatgatctatgttgttaattaacagagacccttttacattttaatcatggggtctcctttgccatgtattggaattcatttaggataatggtctatgtaataatattggttcctaatatgattttttcaaactaaatatttttaaataaacagaactgaagggccaacctggacatgcatatctggaaacattgaaaacactgaaagatgtgctaaatgattcagaaaataaggcccaggtgtctctgaatgtccttaatgatcttgccaaggtggagaaggccctgcaagaaaaaaaggtaacatatatcttccatgttagaactctagcgcttcttctaatatctcctcttacatattttgaaatgttttttcagagattaaaaaaaaagttggtcagttttgttcatcattggtgcaaaaatgtgtttatgatttgagggttagtttgacctcacataaaagaaagtacagttattaaaaattttttcatagaagaaaagcatattttctccttctgctgtgattagcttaaaattctcaacctgttcataaaatctgctaaaatatctttatgaaatgaggactatcagttgacgtgttgatgtatacttttttctgcatcgaataggaatgtttccgaggtcatttagttgagtagccttatggctctgtgctattagatgaaaaggagagcagccattgagcactgcacacttggcccacactgggtttgctgttcccttggtttttagggttgagaatacactgtattgcccacacacaactcatgaagaaaaagctttaatttttatgattatgcctatttttttcatgagtttttcatgttttgttttgttttgttttttgatttccaacttttattttaagttcaggggtacttgtgcaggatgtgcaggtttgttaaatgggtaaacgtgtgtcatggtagtttgctgcactacgtattaagcccagcatccattagctcttcttcctgatgctttccctcccaccatgccccaccctccaacagaccccagtgtgtgtttttccccaccatgtgtccgtatgttctcattattcagctcccacttataagtgagaatatgcggtatttttttttgttgtttctgaattagtttgccgaggataatggcttccagctccatccatatacctgcaaaggacatgatcttgttcctttttatggctgcatagtattccatggttgatatgtaccacattttctttaagtagtctatcattgatgggcatttgggttgattccttgtccttgctattgtgaattgtgctgcaatgaacatagtgtgcatatatctttataacagaatgatttgtattcctttgggtatatacccagtgagattgctgggtcaaatggcatttctggttttaggtctttgaggaatcaccacactgtcttccacagtggttgaactaattcacactcccacccactgttctttttagataaaaatgctttctaatgcattttaaagtgacttttgactttatatagcccattttactatatctgtgcagacacatttttgtgcatatttttaatcttttaaaactttttccagacccttgatgaaatccttgagaatcagaaacctgcattacataaacttgcagaagaaacaaaggctctggagaaaaatgttcatcctgatgtagaaaaattatataagcaagaatttgatgatgtgcaaggaaagtggaacaagctaaaggtcttggtttccaaagatctacatttgcttgaggaaattgctctcacactcagagcttttgaggtaaatccagaggccactgggagtttaagtttattacggggtaaatagtaattatcttataagattcacgtatttattatttaaatattttacattctttctagatccccatttattatgtatttaagttgggacttatcaaagatgtacttttaatgtgctagagagcacatttatttccttttgcctggaagcaaagtcaaaagtagagtaaactggaccttgaagataagagaaaattgcttaaaaatggtcaaaataatgtttcaggcatggagggcctgtgtgaaatacagactgttgattagattatagtagtaacttggttggggtggtagaaatagcccaggtagtagtaaattgctgaatacatgaaactactttttgcaggtttttgacatttgaagtcaaaagtcagagataggccattgacagtgtcagagtgggaaggcaaatcgttccagggacatgaaaattcagaaacaggatccttcactacacctgaaaatgttgacagatgcagcagtgataaagtttaagaggaaaggataaatgtgaggatgtataaggagagagtcaatgtcaatagaagtcagtgtcagattttaacattctgcctgtgagaaagatggagaagcagagtttccaggtcacctggtattttaataggaaagttctgggtggagaatgaaccaatcacactctctccctgcaaggcttcctatcctccagtgactccttaccttggtctttttttttttttttccccatcagtcagggatctttgtcttttttaaatttcttattcaccgatgtatgccaagatgtactcataactagagcaatgcctggcacagagaaggcatccaatcaatatttttcaacgaatgaaatgaaattagcaataggagatttagatttggatatatctctgtatatctatctatctatatatatagatagatagattctcttggaagctaaatccaaatatgtgtagatatatatctatatatatagggagatgtctctgtatatatgcatatacatctttatttatatagagagaatctaaatccgaatctatatatatttagatgtagatccaaatatatgtagatacaatatatatatctacatatatttggatctacatctaaatattatatctacatatatttggatctagatctaaatatatatagatttggatttagatgctaagcaaatttgcataaggaatattgcccccaaaaagtgaaaagattgaaagcgaagacaaaaattaatgaaaatgtatgttttgaaaatcaaagtcagagaacacgtggtagaagaggagctggaagacctcacagattagtgtggaagggatccagccagattctctgagtggaccactgaatttggaggggcgttctttgactcaggaactaatgggtagttccaatgaatgatcagcagaagatacagatggaggggttgtgtgtgtgtgtgggtagctgtgtgtgatggtagtgacaggaggtagtttttctctaggtgtaagtgcagttctagatggagatctcattcaaataaaccagtaattatggagagaaatgtgttttgtgtggcttagtgtttttgactcatttacttttttttttttgagatggagtcttgctctgttgccccaggctggagtgccatggtgcaatcttggcttactgcaacttcagcctcccgggttcaagcagttctcctgcctcagcctcctgattaactgggactacaggcacatgccactatgcccggctaaggttttatttttagtagagatgaggttttaccatgttggccaggctggtctcaaactcctgacctcaggtgatccaccctcctcggcctcccaaaatgctaggattacagacatgagccaccatgcctggcccattttactttgcgatggtcccacttctcgttgtgtattatgagttgcaattgttcccgg

SEQ ID NO: 252 - DNA, 4046 bp, Homo sapiens
gtttggaagtggcaatgaggatcaaggaaggtgataattagaagtttgtatctctatctatctatctatctatctatctatctatctatctatccatccatccacatacatatggtgacaaataattcattgtgaattactgattcaaaatacaggaataaatatatgggaaatttaaagtgtcctcaggaaggaggtaaccacatgtgtgaataattatctagagcatttccagactattgcattgcattgactagtacaaatgttgaagtagttttggacaaacataattttgccaaattttcattttgctaaaaagaacaggcatataaaacaaatcaacaaacaaagatagtctatttcatctattatattcatgatatcctgaaaaaaaggaacattttaatgccaaaaaatagaaagtatatattctcaggataattaaagataattttgagggtgttttgttgttgttaagcttatggtagtgtctttattttcttcatttctttttggatctgtgaaaattatattgctgactagtgttcaagaagtacacatacagagaattttctggaaatggggcccaagaatctctgtctctctctttctctttctgtgtgtgtgcatgtatttttatgaaaagctgaccaggttaacctgatgatcagccaggcttgggaatgggattgtgagtgttgctggcatcagctccttggttaccctgtggggacagtggaagaaaagctcttgtttggtcctgtctatttttatgccggagatcctgtttggagggagggactgggaaagcctctgtctcttgcttaactctaacttctgtgagaaccatccagctcctgtgctggcctttggttactatccacctagcagccaagcaggccctggcagggtggccactactgtggcgtttaatttgagcatgaggctgaacctgccaagtagaggttggactgtgactgcagaacggcgccttctctcacagtagaagtcagtttgtcgttatggggaggagtgctctgaaaatatttctagacttctccaaaatttttaactaagttactgaatcagaatcagacaactatctattttttactgtaacttttttgtgtctgtgtggcatatacaaacatagtagacatcaaaaccaaaattttatagagcggtgtcttatgacatctttaatagcagcctctccctccctgctttttaaaagtgaaatcttaatgggaagtgcagttaaaaagaagaaaatggacattttgattgcttctaggggttttttttttttttttttttttgagacagagtctcgctctgttccctgggttagagtgcagtggtgcgatctcggctcactgcaacctctgccacccaggttcaggcaattctcccgcctctacctcccaagtagctgggactacaggcatgcaccaccatgcctggttagtttttgtatttttagtagagatggggttttgccatgttggccatgctgatctcaaactcctgacctcaggtgatccccctgccgtggcctcccaaagtgctgggattacaggtgtgagccaccaagactgactggcttctagattttttgtttttgctttcttttttcttttttccattataagtagtgctacattaaatttacttcatatatgtgcttttactgttatagattagattcctacatctgggattacagtcaacagttatgcattgtcaaaattataatagctatttcgagataagagtattatccaaatgtggtgtggaatcccagtcttaagattattttcattactgcttatattccacagcgttagcatgagatgtatgagattttatctgaattttaaagcatgcaattcgttgtggaaagttattactgtgcctttaaatattaagagctaaaacttgacattgaacacattaacatttgtttatttgggggaatggcttttcctttgtagatcgctactcaaaaaagtaggttgtctgaaagtcaagaaaaagctgcgaacctgaagaaagacttggcagagatgcaggaatggatgacccaggccgaggaagaatatttggagcgggattttgagtacaagtcaccagaagagcttgagagtgctgtggaagagatgaaggtgaggcggggacgaccagtgccaacaggcttcatgcctccctcctccctttaaaaccagcacatcaatcatctgtctatctgtcaaacactatgtgcatgtagcatctttcacagtaggtttttgaattaaaaaaacataacagggtagctgctctaattttagcaggggaagaaagccaggagtccacatatttggcttggcccatgagttgagtccatgagggcccatgagacaagctcttaagttagacctttgggaggctacagagaatgacttaaaaacctctggtagtgggcatgaggaagaatgatcatttttttttaattggggtaaatacatataacattggtcagcttaatttttaagtgcacaatccagtggcattaattgcattcatcactatttccaaacattttcacaaagagttattttttgtaaggggaacaaaagagacctcccaagttgtctgaggtttattcttattttcctgttactaatcttccagttaatacatacggcacatatgaacactgacgtttcattagagcaggtaggaatagcggtaggaatgcatcggggagttcatattagttggatccactggatacatttcctgtaaacttgtactcctctgtcgatagtcttgaacactctctttttatatataataaaagaactgggcatcattcccaaatttctaacacagcttcaactgtccttgaatgttcaagccaaaggagatggtgttttcaaagcttttttttcctgtaagcttaagcaacacagtgactaatgttttacctcaaagttaacttacctagaagtgtaactaaagcaaaaatctgtgatttttttcaaaaaagggattatatgacattcatacattattatacatgaatcaaagtaaatatgacaggagacttgttggaagttgttttttcactaaaacatcttttttagtgtagctctttttgaaagatttaaaaatactcagtacataaggtattttaaaataggctaccatgttaagaattgtctcatttattgtctttctttacactattggcattgtagttctgtggattttaaaagttgctatagatgagatttgagaaaaatgatatttaaatatttgattgggcaacattttatttatttttattctttcaaacagccattaggacttacaaaaccactacacttaattactttcccccaatctaaggaagttcaaaaccattaagtagtagagaaaagtaaaggggaaagtgaaagactgttttatttgtatttattgccattaaaagtaatggcataaactgcaattacttttgcaccaacctgataggttgattttcctgaatgtcagattgtttatcttagcactgagaaacagctatttctggatcagatcatctcagtctaactttatcattgaaatgctattaattagcagaaggatacatgtgcctatgttctataattttttaaaaagcttaaattatttagagaacttttaaagatacttctaccatagtgtacctcaatttttgtgaaaatatatttatcacagtgtaatctgctcagccctccagtgataatgaaaattcactcacttaaattctgatcttggacccagactttgaaaatacttcatgtcagtaaacatactttggataacttacgttaacactgctgttatgaaatgaaaacatttgtgggagctgagtacattggatgcatgagtgaaatttcagagttagcattcttatttcaaaaacgctcaactgggctgggtgcagtggctcacgcctctaatcccagcactttgggaggccaaggtgggtggatcacctcaggtcaggagtttgagaccag

SEQ ID NO: 253 - DNA, 4042 bp, Homo sapiens
cttatattccacagcgttagcatgagatgtatgagattttatctgaattttaaagcatgcaattcgttgtggaaagttattactgtgcctttaaatattaagagctaaaacttgacattgaacacattaacatttgtttatttgggggaatggcttttcctttgtagatcgctactcaaaaaagtaggttgtctgaaagtcaagaaaaagctgcgaacctgaagaaagacttggcagagatgcaggaatggatgacccaggccgaggaagaatatttggagcgggattttgagtacaagtcaccagaagagcttgagagtgctgtggaagagatgaaggtgaggcggggacgaccagtgccaacaggcttcatgcctccctcctccctttaaaaccagcacatcaatcatctgtctatctgtcaaacactatgtgcatgtagcatctttcacagtaggtttttgaattaaaaaaacataacagggtagctgctctaattttagcaggggaagaaagccaggagtccacatatttggcttggcccatgagttgagtccatgagggcccatgagacaagctcttaagttagacctttgggaggctacagagaatgacttaaaaacctctggtagtgggcatgaggaagaatgatcatttttttttaattggggtaaatacatataacattggtcagcttaatttttaagtgcacaatccagtggcattaattgcattcatcactatttccaaacattttcacaaagagttattttttgtaaggggaacaaaagagacctcccaagttgtctgaggtttattcttattttcctgttactaatcttccagttaatacatacggcacatatgaacactgacgtttcattagagcaggtaggaatagcggtaggaatgcatcggggagttcatattagttggatccactggatacatttcctgtaaacttgtactcctctgtcgatagtcttgaacactctctttttatatataataaaagaactgggcatcattcccaaatttctaacacagcttcaactgtccttgaatgttcaagccaaaggagatggtgttttcaaagcttttttttcctgtaagcttaagcaacacagtgactaatgttttacctcaaagttaacttacctagaagtgtaactaaagcaaaaatctgtgatttttttcaaaaaagggattatatgacattcatacattattatacatgaatcaaagtaaatatgacaggagacttgttggaagttgttttttcactaaaacatcttttttagtgtagctctttttgaaagatttaaaaatactcagtacataaggtattttaaaataggctaccatgttaagaattgtctcatttattgtctttctttacactattggcattgtagttctgtggattttaaaagttgctatagatgagatttgagaaaaatgatatttaaatatttgattgggcaacattttatttatttttattctttcaaacagccattaggacttacaaaaccactacacttaattactttcccccaatctaaggaagttcaaaaccattaagtagtagagaaaagtaaaggggaaagtgaaagactgttttatttgtatttattgccattaaaagtaatggcataaactgcaattacttttgcaccaacctgataggttgattttcctgaatgtcagattgtttatcttagcactgagaaacagctatttctggatcagatcatctcagtctaactttatcattgaaatgctattaattagcagaaggatacatgtgcctatgttctataattttttaaaaagcttaaattatttagagaacttttaaagatacttctaccatagtgtacctcaatttttgtgaaaatatatttatcacagtgtaatctgctcagccctccagtgataatgaaaattcactcacttaaattctgatcttggacccagactttgaaaatacttcatgtcagtaaacatactttggataacttacgttaacactgctgttatgaaatgaaaacatttgtgggagctgagtacattggatgcatgagtgaaatttcagagttagcattcttatttcaaaaacgctcaactgggctgggtgcagtggctcacgcctctaatcccagcactttgggaggccaaggtgggtggatcacctcaggtcaggagtttgagaccagccccgccaacatggcgaagcctcatctcgactaaaaaatatgaaaattaggtaggcatagtggtgggtgcctgtaatcacagcttctcgggaggctgaggcaggagaatttcttgaactgggaggcagaggttgtagtgaacaagactctatctcaaaaacaaaaacaaaaacaaaaccccacaaagaaccattcactgttacctaaataatgttctattttggcagttagaatcatccagatgttttaactttggtttaattcttgaaaaaaaaagaaagaaaagaaattggttactgagaaagggagacgtttttcaagttcatccatcctttcttggaacagagggcaaaagaggatgtgttgcagaaggaggtgagagtgaagattctcaaggacaacatcaagttattagctgccaaggtgccctctggtggccaggagttgacgtctgagctgaatgttgtgctggagaattaccaacttctttgtaatagaattcgaggaaagtgccacacgctagaggtatgctattattattattgttgttattattattattattattattattattattttcagtgatgtatttctgagatccaaactctgtaatgttttggccattttcaaatcttggagaaaacttctcttttctttcaaattctggattataaagaaaaaatagttcttgggaaatagtttgataaaaatgaaagaggggttaaaaacaggagaccaaaatctgtccctaattatcagaaggttcttgggcaagtcattttgtatattcaaactttactttttttataggtgcaatccaggttttcatgtaacagatgatctgtagggcctattccagtccaaaaattgcagagcacatttcaagcctctcttttgttttgttttgcctggttgagtacatagagaggaattattttcttttgagtggtgtctaaagttcaagagtcacctgaaggaaaaatagaacttaaatatgtgacagttttactgggtcttagataaaataccttttttttttctccctggccattacacgtaaaatgtagatgagtctatgaaatttttttaaactaagagtgaggttttgcttgtttgtttttatagtagtatgacttttgttattgcttgttggaagatttaagaaggctttcaatttacaacaatttaatttacattcaatttgacgtaaaacaaatatttgtattgtggcaaatcttgaaatggtaaaaaatggcaactgcaatatttaacctaaattcattcattactttgatcattcattcatttgtaaattcattcgtttcttgttctaaaccaattttgtgctaagataaatatatatcattgaggcaagttagtaagaaagctacttgatttgggatctgtctgcttcttggaagtggtcttctttgagtcattttttctttcccataagaaaagaggttgtgcttgcatctgagcagatttttggtctgctttttgcttgtggaaattgggggactagaacctcttttcttttattctaattcagtggctggaaaattatggctgaggattttgttttgttttgtttgagacagggtcttgctctgtcacctatgctggagtgcagtggtatgatcacagctcactgtaacctcaaactcctgggctcaagtgaccttcctgcccccgcttcctgagtagctatgactccagccttgcaatgccacacctggctaattatttttaaattttttttgtagagatgggggtcttgctatgttgcccaagttggtctggaactcttgggctcaagc

SEQ ID NO: 254 - DNA, 4046 bp, Homo sapiens
atgatcatttttttttaattggggtaaatacatataacattggtcagcttaatttttaagtgcacaatccagtggcattaattgcattcatcactatttccaaacattttcacaaagagttattttttgtaaggggaacaaaagagacctcccaagttgtctgaggtttattcttattttcctgttactaatcttccagttaatacatacggcacatatgaacactgacgtttcattagagcaggtaggaatagcggtaggaatgcatcggggagttcatattagttggatccactggatacatttcctgtaaacttgtactcctctgtcgatagtcttgaacactctctttttatatataataaaagaactgggcatcattcccaaatttctaacacagcttcaactgtccttgaatgttcaagccaaaggagatggtgttttcaaagcttttttttcctgtaagcttaagcaacacagtgactaatgttttacctcaaagttaacttacctagaagtgtaactaaagcaaaaatctgtgatttttttcaaaaaagggattatatgacattcatacattattatacatgaatcaaagtaaatatgacaggagacttgttggaagttgttttttcactaaaacatcttttttagtgtagctctttttgaaagatttaaaaatactcagtacataaggtattttaaaataggctaccatgttaagaattgtctcatttattgtctttctttacactattggcattgtagttctgtggattttaaaagttgctatagatgagatttgagaaaaatgatatttaaatatttgattgggcaacattttatttatttttattctttcaaacagccattaggacttacaaaaccactacacttaattactttcccccaatctaaggaagttcaaaaccattaagtagtagagaaaagtaaaggggaaagtgaaagactgttttatttgtatttattgccattaaaagtaatggcataaactgcaattacttttgcaccaacctgataggttgattttcctgaatgtcagattgtttatcttagcactgagaaacagctatttctggatcagatcatctcagtctaactttatcattgaaatgctattaattagcagaaggatacatgtgcctatgttctataattttttaaaaagcttaaattatttagagaacttttaaagatacttctaccatagtgtacctcaatttttgtgaaaatatatttatcacagtgtaatctgctcagccctccagtgataatgaaaattcactcacttaaattctgatcttggacccagactttgaaaatacttcatgtcagtaaacatactttggataacttacgttaacactgctgttatgaaatgaaaacatttgtgggagctgagtacattggatgcatgagtgaaatttcagagttagcattcttatttcaaaaacgctcaactgggctgggtgcagtggctcacgcctctaatcccagcactttgggaggccaaggtgggtggatcacctcaggtcaggagtttgagaccagccccgccaacatggcgaagcctcatctcgactaaaaaatatgaaaattaggtaggcatagtggtgggtgcctgtaatcacagcttctcgggaggctgaggcaggagaatttcttgaactgggaggcagaggttgtagtgaacaagactctatctcaaaaacaaaaacaaaaacaaaaccccacaaagaaccattcactgttacctaaataatgttctattttggcagttagaatcatccagatgttttaactttggtttaattcttgaaaaaaaaagaaagaaaagaaattggttactgagaaagggagacgtttttcaagttcatccatcctttcttggaacagagggcaaaagaggatgtgttgcagaaggaggtgagagtgaagattctcaaggacaacatcaagttattagctgccaaggtgccctctggtggccaggagttgacgtctgagctgaatgttgtgctggagaattaccaacttctttgtaatagaattcgaggaaagtgccacacgctagaggtatgctattattattattgttgttattattattattattattattattattattttcagtgatgtatttctgagatccaaactctgtaatgttttggccattttcaaatcttggagaaaacttctcttttctttcaaattctggattataaagaaaaaatagttcttgggaaatagtttgataaaaatgaaagaggggttaaaaacaggagaccaaaatctgtccctaattatcagaaggttcttgggcaagtcattttgtatattcaaactttactttttttataggtgcaatccaggttttcatgtaacagatgatctgtagggcctattccagtccaaaaattgcagagcacatttcaagcctctcttttgttttgttttgcctggttgagtacatagagaggaattattttcttttgagtggtgtctaaagttcaagagtcacctgaaggaaaaatagaacttaaatatgtgacagttttactgggtcttagataaaataccttttttttttctccctggccattacacgtaaaatgtagatgagtctatgaaatttttttaaactaagagtgaggttttgcttgtttgtttttatagtagtatgacttttgttattgcttgttggaagatttaagaaggctttcaatttacaacaatttaatttacattcaatttgacgtaaaacaaatatttgtattgtggcaaatcttgaaatggtaaaaaatggcaactgcaatatttaacctaaattcattcattactttgatcattcattcatttgtaaattcattcgtttcttgttctaaaccaattttgtgctaagataaatatatatcattgaggcaagttagtaagaaagctacttgatttgggatctgtctgcttcttggaagtggtcttctttgagtcattttttctttcccataagaaaagaggttgtgcttgcatctgagcagatttttggtctgctttttgcttgtggaaattgggggactagaacctcttttcttttattctaattcagtggctggaaaattatggctgaggattttgttttgttttgtttgagacagggtcttgctctgtcacctatgctggagtgcagtggtatgatcacagctcactgtaacctcaaactcctgggctcaagtgaccttcctgcccccgcttcctgagtagctatgactccagccttgcaatgccacacctggctaattatttttaaattttttttgtagagatgggggtcttgctatgttgcccaagttggtctggaactcttgggctcaagccatcctcctgccttggcctaccaaagtcctgggattaaaggcattagccactgcacccggactggctgagggtttaaatctaacttgtagtttggttttggatacctggttaactgagaatagtttatacatttctcaagggttgtacaacacatacccccctccaagaagaatctgtgataggaagcaaatgtgtcctcccaaaacctaaaatatttactggctggccctttgtagaaaaatgtactgctccttgatctggtaagcatacttcatatggagagtggaccggcaggtgccttcactcatttatgtaaaccagaagatgcctccactcattcagtacattcaagacgacaagcccaggaggcatccagctgagttctttctcctaaacttaccactcaaataagttcctcttataataagggattataaatttataaatgtttccacccactacacaacccctgggtccctgctctggaaacctcagaggggaatgagtgatcaaaaccaacacagtaagaacagtataactccagttttggtaaaatgtggctctcttatattgacatgtcctcatgaatttagaaaaaagttgggaaggctacattgcaaacttttacatcagttagctccaagttggaa

SEQ ID NO: 255 - DNA, 4028 bp, Homo sapiens
ggatccactggatacatttcctgtaaacttgtactcctctgtcgatagtcttgaacactctctttttatatataataaaagaactgggcatcattcccaaatttctaacacagcttcaactgtccttgaatgttcaagccaaaggagatggtgttttcaaagcttttttttcctgtaagcttaagcaacacagtgactaatgttttacctcaaagttaacttacctagaagtgtaactaaagcaaaaatctgtgatttttttcaaaaaagggattatatgacattcatacattattatacatgaatcaaagtaaatatgacaggagacttgttggaagttgttttttcactaaaacatcttttttagtgtagctctttttgaaagatttaaaaatactcagtacataaggtattttaaaataggctaccatgttaagaattgtctcatttattgtctttctttacactattggcattgtagttctgtggattttaaaagttgctatagatgagatttgagaaaaatgatatttaaatatttgattgggcaacattttatttatttttattctttcaaacagccattaggacttacaaaaccactacacttaattactttcccccaatctaaggaagttcaaaaccattaagtagtagagaaaagtaaaggggaaagtgaaagactgttttatttgtatttattgccattaaaagtaatggcataaactgcaattacttttgcaccaacctgataggttgattttcctgaatgtcagattgtttatcttagcactgagaaacagctatttctggatcagatcatctcagtctaactttatcattgaaatgctattaattagcagaaggatacatgtgcctatgttctataattttttaaaaagcttaaattatttagagaacttttaaagatacttctaccatagtgtacctcaatttttgtgaaaatatatttatcacagtgtaatctgctcagccctccagtgataatgaaaattcactcacttaaattctgatcttggacccagactttgaaaatacttcatgtcagtaaacatactttggataacttacgttaacactgctgttatgaaatgaaaacatttgtgggagctgagtacattggatgcatgagtgaaatttcagagttagcattcttatttcaaaaacgctcaactgggctgggtgcagtggctcacgcctctaatcccagcactttgggaggccaaggtgggtggatcacctcaggtcaggagtttgagaccagccccgccaacatggcgaagcctcatctcgactaaaaaatatgaaaattaggtaggcatagtggtgggtgcctgtaatcacagcttctcgggaggctgaggcaggagaatttcttgaactgggaggcagaggttgtagtgaacaagactctatctcaaaaacaaaaacaaaaacaaaaccccacaaagaaccattcactgttacctaaataatgttctattttggcagttagaatcatccagatgttttaactttggtttaattcttgaaaaaaaaagaaagaaaagaaattggttactgagaaagggagacgtttttcaagttcatccatcctttcttggaacagagggcaaaagaggatgtgttgcagaaggaggtgagagtgaagattctcaaggacaacatcaagttattagctgccaaggtgccctctggtggccaggagttgacgtctgagctgaatgttgtgctggagaattaccaacttctttgtaatagaattcgaggaaagtgccacacgctagaggtatgctattattattattgttgttattattattattattattattattattattttcagtgatgtatttctgagatccaaactctgtaatgttttggccattttcaaatcttggagaaaacttctcttttctttcaaattctggattataaagaaaaaatagttcttgggaaatagtttgataaaaatgaaagaggggttaaaaacaggagaccaaaatctgtccctaattatcagaaggttcttgggcaagtcattttgtatattcaaactttactttttttataggtgcaatccaggttttcatgtaacagatgatctgtagggcctattccagtccaaaaattgcagagcacatttcaagcctctcttttgttttgttttgcctggttgagtacatagagaggaattattttcttttgagtggtgtctaaagttcaagagtcacctgaaggaaaaatagaacttaaatatgtgacagttttactgggtcttagataaaataccttttttttttctccctggccattacacgtaaaatgtagatgagtctatgaaatttttttaaactaagagtgaggttttgcttgtttgtttttatagtagtatgacttttgttattgcttgttggaagatttaagaaggctttcaatttacaacaatttaatttacattcaatttgacgtaaaacaaatatttgtattgtggcaaatcttgaaatggtaaaaaatggcaactgcaatatttaacctaaattcattcattactttgatcattcattcatttgtaaattcattcgtttcttgttctaaaccaattttgtgctaagataaatatatatcattgaggcaagttagtaagaaagctacttgatttgggatctgtctgcttcttggaagtggtcttctttgagtcattttttctttcccataagaaaagaggttgtgcttgcatctgagcagatttttggtctgctttttgcttgtggaaattgggggactagaacctcttttcttttattctaattcagtggctggaaaattatggctgaggattttgttttgttttgtttgagacagggtcttgctctgtcacctatgctggagtgcagtggtatgatcacagctcactgtaacctcaaactcctgggctcaagtgaccttcctgcccccgcttcctgagtagctatgactccagccttgcaatgccacacctggctaattatttttaaattttttttgtagagatgggggtcttgctatgttgcccaagttggtctggaactcttgggctcaagccatcctcctgccttggcctaccaaagtcctgggattaaaggcattagccactgcacccggactggctgagggtttaaatctaacttgtagtttggttttggatacctggttaactgagaatagtttatacatttctcaagggttgtacaacacatacccccctccaagaagaatctgtgataggaagcaaatgtgtcctcccaaaacctaaaatatttactggctggccctttgtagaaaaatgtactgctccttgatctggtaagcatacttcatatggagagtggaccggcaggtgccttcactcatttatgtaaaccagaagatgcctccactcattcagtacattcaagacgacaagcccaggaggcatccagctgagttctttctcctaaacttaccactcaaataagttcctcttataataagggattataaatttataaatgtttccacccactacacaacccctgggtccctgctctggaaacctcagaggggaatgagtgatcaaaaccaacacagtaagaacagtataactccagttttggtaaaatgtggctctcttatattgacatgtcctcatgaatttagaaaaaagttgggaaggctacattgcaaacttttacatcagttagctccaagttggaattgggtggggcccaggagatttcaattttctatgaaattattttttaaaaatttacaattgggagcaattttttcattttgttcaaaaaccaaactttttttttttttttttttttttttttgagatggagtttcactcttgttacccaggctggagggcagtggcgtggcctgggcttactgtaacctctgcctcccaggttcaagtgattctcctgcctcagcctcccgagtagctgggattacaggtgcctgccaccatgcccagc

SEQ ID NO: 256 - DNA, 4075 bp, Homo sapiens
tctttttatatataataaaagaactgggcatcattcccaaatttctaacacagcttcaactgtccttgaatgttcaagccaaaggagatggtgttttcaaagcttttttttcctgtaagcttaagcaacacagtgactaatgttttacctcaaagttaacttacctagaagtgtaactaaagcaaaaatctgtgatttttttcaaaaaagggattatatgacattcatacattattatacatgaatcaaagtaaatatgacaggagacttgttggaagttgttttttcactaaaacatcttttttagtgtagctctttttgaaagatttaaaaatactcagtacataaggtattttaaaataggctaccatgttaagaattgtctcatttattgtctttctttacactattggcattgtagttctgtggattttaaaagttgctatagatgagatttgagaaaaatgatatttaaatatttgattgggcaacattttatttatttttattctttcaaacagccattaggacttacaaaaccactacacttaattactttcccccaatctaaggaagttcaaaaccattaagtagtagagaaaagtaaaggggaaagtgaaagactgttttatttgtatttattgccattaaaagtaatggcataaactgcaattacttttgcaccaacctgataggttgattttcctgaatgtcagattgtttatcttagcactgagaaacagctatttctggatcagatcatctcagtctaactttatcattgaaatgctattaattagcagaaggatacatgtgcctatgttctataattttttaaaaagcttaaattatttagagaacttttaaagatacttctaccatagtgtacctcaatttttgtgaaaatatatttatcacagtgtaatctgctcagccctccagtgataatgaaaattcactcacttaaattctgatcttggacccagactttgaaaatacttcatgtcagtaaacatactttggataacttacgttaacactgctgttatgaaatgaaaacatttgtgggagctgagtacattggatgcatgagtgaaatttcagagttagcattcttatttcaaaaacgctcaactgggctgggtgcagtggctcacgcctctaatcccagcactttgggaggccaaggtgggtggatcacctcaggtcaggagtttgagaccagccccgccaacatggcgaagcctcatctcgactaaaaaatatgaaaattaggtaggcatagtggtgggtgcctgtaatcacagcttctcgggaggctgaggcaggagaatttcttgaactgggaggcagaggttgtagtgaacaagactctatctcaaaaacaaaaacaaaaacaaaaccccacaaagaaccattcactgttacctaaataatgttctattttggcagttagaatcatccagatgttttaactttggtttaattcttgaaaaaaaaagaaagaaaagaaattggttactgagaaagggagacgtttttcaagttcatccatcctttcttggaacagagggcaaaagaggatgtgttgcagaaggaggtgagagtgaagattctcaaggacaacatcaagttattagctgccaaggtgccctctggtggccaggagttgacgtctgagctgaatgttgtgctggagaattaccaacttctttgtaatagaattcgaggaaagtgccacacgctagaggtatgctattattattattgttgttattattattattattattattattattattttcagtgatgtatttctgagatccaaactctgtaatgttttggccattttcaaatcttggagaaaacttctcttttctttcaaattctggattataaagaaaaaatagttcttgggaaatagtttgataaaaatgaaagaggggttaaaaacaggagaccaaaatctgtccctaattatcagaaggttcttgggcaagtcattttgtatattcaaactttactttttttataggtgcaatccaggttttcatgtaacagatgatctgtagggcctattccagtccaaaaattgcagagcacatttcaagcctctcttttgttttgttttgcctggttgagtacatagagaggaattattttcttttgagtggtgtctaaagttcaagagtcacctgaaggaaaaatagaacttaaatatgtgacagttttactgggtcttagataaaataccttttttttttctccctggccattacacgtaaaatgtagatgagtctatgaaatttttttaaactaagagtgaggttttgcttgtttgtttttatagtagtatgacttttgttattgcttgttggaagatttaagaaggctttcaatttacaacaatttaatttacattcaatttgacgtaaaacaaatatttgtattgtggcaaatcttgaaatggtaaaaaatggcaactgcaatatttaacctaaattcattcattactttgatcattcattcatttgtaaattcattcgtttcttgttctaaaccaattttgtgctaagataaatatatatcattgaggcaagttagtaagaaagctacttgatttgggatctgtctgcttcttggaagtggtcttctttgagtcattttttctttcccataagaaaagaggttgtgcttgcatctgagcagatttttggtctgctttttgcttgtggaaattgggggactagaacctcttttcttttattctaattcagtggctggaaaattatggctgaggattttgttttgttttgtttgagacagggtcttgctctgtcacctatgctggagtgcagtggtatgatcacagctcactgtaacctcaaactcctgggctcaagtgaccttcctgcccccgcttcctgagtagctatgactccagccttgcaatgccacacctggctaattatttttaaattttttttgtagagatgggggtcttgctatgttgcccaagttggtctggaactcttgggctcaagccatcctcctgccttggcctaccaaagtcctgggattaaaggcattagccactgcacccggactggctgagggtttaaatctaacttgtagtttggttttggatacctggttaactgagaatagtttatacatttctcaagggttgtacaacacatacccccctccaagaagaatctgtgataggaagcaaatgtgtcctcccaaaacctaaaatatttactggctggccctttgtagaaaaatgtactgctccttgatctggtaagcatacttcatatggagagtggaccggcaggtgccttcactcatttatgtaaaccagaagatgcctccactcattcagtacattcaagacgacaagcccaggaggcatccagctgagttctttctcctaaacttaccactcaaataagttcctcttataataagggattataaatttataaatgtttccacccactacacaacccctgggtccctgctctggaaacctcagaggggaatgagtgatcaaaaccaacacagtaagaacagtataactccagttttggtaaaatgtggctctcttatattgacatgtcctcatgaatttagaaaaaagttgggaaggctacattgcaaacttttacatcagttagctccaagttggaattgggtggggcccaggagatttcaattttctatgaaattattttttaaaaatttacaattgggagcaattttttcattttgttcaaaaaccaaactttttttttttttttttttttttttttgagatggagtttcactcttgttacccaggctggagggcagtggcgtggcctgggcttactgtaacctctgcctcccaggttcaagtgattctcctgcctcagcctcccgagtagctgggattacaggtgcctgccaccatgcccagctagtttttgtatttttagtagagatggggtttcaccatgttggccaggctggtcttgaactcctgacctcatgtgatccacctgccttggcctcccaaaatgctgag

SEQ ID NO: 257 - DNA, 4041 bp, Homo sapiens
gctcaagtgaccttcctgcccccgcttcctgagtagctatgactccagccttgcaatgccacacctggctaattatttttaaattttttttgtagagatgggggtcttgctatgttgcccaagttggtctggaactcttgggctcaagccatcctcctgccttggcctaccaaagtcctgggattaaaggcattagccactgcacccggactggctgagggtttaaatctaacttgtagtttggttttggatacctggttaactgagaatagtttatacatttctcaagggttgtacaacacatacccccctccaagaagaatctgtgataggaagcaaatgtgtcctcccaaaacctaaaatatttactggctggccctttgtagaaaaatgtactgctccttgatctggtaagcatacttcatatggagagtggaccggcaggtgccttcactcatttatgtaaaccagaagatgcctccactcattcagtacattcaagacgacaagcccaggaggcatccagctgagttctttctcctaaacttaccactcaaataagttcctcttataataagggattataaatttataaatgtttccacccactacacaacccctgggtccctgctctggaaacctcagaggggaatgagtgatcaaaaccaacacagtaagaacagtataactccagttttggtaaaatgtggctctcttatattgacatgtcctcatgaatttagaaaaaagttgggaaggctacattgcaaacttttacatcagttagctccaagttggaattgggtggggcccaggagatttcaattttctatgaaattattttttaaaaatttacaattgggagcaattttttcattttgttcaaaaaccaaactttttttttttttttttttttttttttgagatggagtttcactcttgttacccaggctggagggcagtggcgtggcctgggcttactgtaacctctgcctcccaggttcaagtgattctcctgcctcagcctcccgagtagctgggattacaggtgcctgccaccatgcccagctagtttttgtatttttagtagagatggggtttcaccatgttggccaggctggtcttgaactcctgacctcatgtgatccacctgccttggcctcccaaaatgctgagattacaggtgtgaaccaccgcacttggtctttaaaaaacaaactaaataatgtttctctcctgtttttcttactaattatatagttctatttttgacatttaaatcagatcatggaatttattttaaagagtgaggcagcctcttgcccactctttgctccccacccttcaccaactggtctcatatgattttgttgattattttattttattttatttgagatggagtcttgctctgttgcccaggctggaatgcagtggtgcaatctcagctcaccgcaacctccgcctcccgggttcacgccattctcctgcctcctccagagtagctgggactacaggcatccgccaccacacccggctaatatttttatatatatatatatatttttagtagagacagggtttcaccgtgttagccaggatggtcttaatctcctgacctcatgatctgcctgcttcagcctcccaaagtgctgggattacaggcgtgagccaccacgcctggccgattttattttatttttttgaagtttcaactccatcagttctgaattcctaggtatactcacatccaaatgaaattattagcgattaaagagaatgtgtagtactagagatacgatgtgtgaaatggctttttgtctaatttaaaatttttcatgctttaggaggtctggtcttgttggattgaactgcttcactatttggatcttgaaactacctggttaaacactttggaagagcggatgaagagcacagaggtcctgcctgagaagacggatgctgtcaacgaagccctggaggttggaacccgtgatctccacggcatttctctttgctgtgatgaggccacacgtgtattacaatgaggaatgtaatgctttacgcaggcaaatgcatttgcttcctcagtggttttcaatgtcacttgcattttcttccatagcctgaagtgtttatacaatcatgtgtatttagattattggtgacccattatatcagcctcaagacgtggttagctgtttgacatcttacattttagacatgttgaagcactctagtggttttccagtttattttagtaggccctggacaaagctctgccatatgttattaggacaactgctctcttgtttcatcaacaagttatttttactcactaaacacagcactgacagtttataggggattcctgtctcttaccttcagatgctagaagttaagacagtggttgagccatgggatcttgtcgtaggagcttgtcttcaagcctggatttgaactccttgaggccaagaaatgtacccgatgctttgttattcctcagttcccagcacagtgtgtagcacatgttaacttaataaccgtttcttaaatgaaatacagtgcaaagagggtaggtttgcttaacaaaaaagaaaagggaagggggtagataggcttttaaaaatgtcatggtaccatgtgggaactgagtggacaactggattaaaggtcagaaatgagtaaaatgtggcacttacattccaggagacggatgctctgctagagaaaagatgtcacttctcaaatatagcagagtgagagacagagtgaatgaaaaatatgaaaagcttaatttttttcctaatgtaagagtgaatacgtatatattcttgaaatatggaaaataaagaaaagtataaagcaaactctaagataaacattttaaaacagtttgtagatttcttcctaattattatcttttatgtatgcatactagaaggtagtatattggatcaaaggctttggagtcttttatttacttatttatctttttatttgagatggaatcttgctatgttgcccaggctggagtgcaattgcatgattttggctcactgcaacctccacctcctgagttcaagcaattctcatgcctcagcctcctgagtagctgggatcacaggcgtgtgccactaccccagctaattttgtatttttagtagagatggggttttaccatgtcggccaggctgggctcgaactcctgacatcaggtgatccacccgcttcggcctcccaatgtgctaggattagaggtgtgagccatcgcacttggccaggctttggagtcttaaagctttagagccatgttggaatcttagctcttcttttgactgtgtgtatgtaggcaagtaatttaacctttctgagcttcaattttccaatctgtaaactgggaatgctatttagcccatatggttaattagatttatgtatataaaaagtgtgtatataaaacaatgcctcttattctgcatatattgtaggaaaatgactacttatttttagtaatataattaataaaagttgagatcattttgcttgtatagtactgttctctgcctttgaactttgtgtcatgagcatttccccatataattaataattatttttaactttttattattcatttatttattgtttagagacatagtctcgctctgttgcccaggctggagtccagtggtatgacagctcactgcagccttgaactcttgggctcaagtgatcctcctgcctcaccctcccataattaataatagttgaaattatttttgtgaaattatatcatatatcacttgtgctaatttctcaattttatgcattttttaatcccatgatggatatttttgtgaattagtaatttacttaacttttggtcctgttacttaggtagatttttagaaaatataattacttgtttaacaaatagacattttggggatccttgataccttttgccttagtaaatgcattattatttttttttcccatctccattccagtctctggaatctgttctgcgccacccggcag

SEQ ID NO: 258 - DNA, 4055 bp, Homo sapiens
tctttgctgtgatgaggccacacgtgtattacaatgaggaatgtaatgctttacgcaggcaaatgcatttgcttcctcagtggttttcaatgtcacttgcattttcttccatagcctgaagtgtttatacaatcatgtgtatttagattattggtgacccattatatcagcctcaagacgtggttagctgtttgacatcttacattttagacatgttgaagcactctagtggttttccagtttattttagtaggccctggacaaagctctgccatatgttattaggacaactgctctcttgtttcatcaacaagttatttttactcactaaacacagcactgacagtttataggggattcctgtctcttaccttcagatgctagaagttaagacagtggttgagccatgggatcttgtcgtaggagcttgtcttcaagcctggatttgaactccttgaggccaagaaatgtacccgatgctttgttattcctcagttcccagcacagtgtgtagcacatgttaacttaataaccgtttcttaaatgaaatacagtgcaaagagggtaggtttgcttaacaaaaaagaaaagggaagggggtagataggcttttaaaaatgtcatggtaccatgtgggaactgagtggacaactggattaaaggtcagaaatgagtaaaatgtggcacttacattccaggagacggatgctctgctagagaaaagatgtcacttctcaaatatagcagagtgagagacagagtgaatgaaaaatatgaaaagcttaatttttttcctaatgtaagagtgaatacgtatatattcttgaaatatggaaaataaagaaaagtataaagcaaactctaagataaacattttaaaacagtttgtagatttcttcctaattattatcttttatgtatgcatactagaaggtagtatattggatcaaaggctttggagtcttttatttacttatttatctttttatttgagatggaatcttgctatgttgcccaggctggagtgcaattgcatgattttggctcactgcaacctccacctcctgagttcaagcaattctcatgcctcagcctcctgagtagctgggatcacaggcgtgtgccactaccccagctaattttgtatttttagtagagatggggttttaccatgtcggccaggctgggctcgaactcctgacatcaggtgatccacccgcttcggcctcccaatgtgctaggattagaggtgtgagccatcgcacttggccaggctttggagtcttaaagctttagagccatgttggaatcttagctcttcttttgactgtgtgtatgtaggcaagtaatttaacctttctgagcttcaattttccaatctgtaaactgggaatgctatttagcccatatggttaattagatttatgtatataaaaagtgtgtatataaaacaatgcctcttattctgcatatattgtaggaaaatgactacttatttttagtaatataattaataaaagttgagatcattttgcttgtatagtactgttctctgcctttgaactttgtgtcatgagcatttccccatataattaataattatttttaactttttattattcatttatttattgtttagagacatagtctcgctctgttgcccaggctggagtccagtggtatgacagctcactgcagccttgaactcttgggctcaagtgatcctcctgcctcaccctcccataattaataatagttgaaattatttttgtgaaattatatcatatatcacttgtgctaatttctcaattttatgcattttttaatcccatgatggatatttttgtgaattagtaatttacttaacttttggtcctgttacttaggtagatttttagaaaatataattacttgtttaacaaatagacattttggggatccttgataccttttgccttagtaaatgcattattatttttttttcccatctccattccagtctctggaatctgttctgcgccacccggcagataatcgcacccagattcgagagcttggccagactctgattgatggggggatcctggatgatataatcagtgagaaactggaggctttcaacagccgatatgaagatctaagtcacctggtaagagttgggacatacatgggtgttgattaggtattgatgaagtggagctggccctaagctccatatcatagagctttaatgttggaaaaatctttaatgttggttaaagttggtaaccaatgctaacaggggcattgagggtattgaaatattcagaaaggaagaatagatctaacactctaagacagaactggatgattaaaaaaattatttttgagattacttctacttacaaacatttaattttcattaaggatcatatgatagctgtatataagaacaacaactcatactatcctagtaaatattagggccatgatatttcacataagctgctgtgaaagccatagtctcttagttcatatccaggttgtaacatacatattcgtatcacaaattagagaaagaacatttcttttataggaaggttgggtatgaatattaggtgcttccaaacacatattaaataataactgttgatgttcagcccatgaataacatcaagcttaacccaaaagtgctgtaaatagtagtttgatatgtatgtacacctatagaatttgttttaggctttggaaaaaaagagactctgatgtttgtgtattgatagacatttttcttatgttttatattcttaattggcagacattgctgattcctaaaaatgctttaaaattataataaataacacatttttatcttctgtttaatgcatcttatgggaaacctttacatttttgtatttcaacattatatatagaaagaagtaataattagtaattcagctgcatggtacataagatcctagtgggacattttcactgttatcattagtaattattatttatttataaagaaagctaaagtcttggatgaaagcttttatggtcttttcttagtggccagaatatatatattctgctatttatatttgtgttgggcaactaatgattcaatttctcctttgtgcaggcagagagcaagcagatttctttggaaaagcaactccaggtgctgcgggaaactgaccagatgcttcaagtcttgcaagagagcttgggggagctggacaaacagctcaccacatacctgactgacaggatagatgctttccaagttccacaggaagctcaggtattgccgtgcatttgagggcttttgagctgtaaagagagcttttgtaattgcctcctcaactataagagaacccctcctgctctccaaaaccgagagtcaatgggaaagattgaccttacttacagggcagcatttgggttttggagttctcttgctttctatgtgagactctggcaaaagtcttatatagtttattttattttattttattttattttatttatttatttgagacagaatcccactatgtcacccaggctggagtgcagtggcacgatcttggctcactgcaacctccgcctcctgggttcaagtgactctcctgcctcagcctcccgaataactgggactacaagcacgcgccaccacgcccggctaattttttgtagttttagtagagacggggtttcgccatgttggccaggctggtcttgaactcctgacttcaagtgatctgcctgcctcggcctcccaataatttttgtatttttagtagagacggggttttgccatattgtccaggctagtctcaaactcctgacttcaggtgatccaccttcctcggcctcccaaaatgctgggattacaggcgtgagccactgtgcctggctgaaaagtcctgtatattttaaattgtagttttcttagctgtgaagttgggacaattccttccttataaataagttgtgaacattagaaacgacaaatgcaaagcccttagcaggtgcgtcatgtacaatagtcataccatgcagtgggccatatt

SEQ ID NO: 259 - DNA, 4064 bp, Homo sapiens
caggcaaatgcatttgcttcctcagtggttttcaatgtcacttgcattttcttccatagcctgaagtgtttatacaatcatgtgtatttagattattggtgacccattatatcagcctcaagacgtggttagctgtttgacatcttacattttagacatgttgaagcactctagtggttttccagtttattttagtaggccctggacaaagctctgccatatgttattaggacaactgctctcttgtttcatcaacaagttatttttactcactaaacacagcactgacagtttataggggattcctgtctcttaccttcagatgctagaagttaagacagtggttgagccatgggatcttgtcgtaggagcttgtcttcaagcctggatttgaactccttgaggccaagaaatgtacccgatgctttgttattcctcagttcccagcacagtgtgtagcacatgttaacttaataaccgtttcttaaatgaaatacagtgcaaagagggtaggtttgcttaacaaaaaagaaaagggaagggggtagataggcttttaaaaatgtcatggtaccatgtgggaactgagtggacaactggattaaaggtcagaaatgagtaaaatgtggcacttacattccaggagacggatgctctgctagagaaaagatgtcacttctcaaatatagcagagtgagagacagagtgaatgaaaaatatgaaaagcttaatttttttcctaatgtaagagtgaatacgtatatattcttgaaatatggaaaataaagaaaagtataaagcaaactctaagataaacattttaaaacagtttgtagatttcttcctaattattatcttttatgtatgcatactagaaggtagtatattggatcaaaggctttggagtcttttatttacttatttatctttttatttgagatggaatcttgctatgttgcccaggctggagtgcaattgcatgattttggctcactgcaacctccacctcctgagttcaagcaattctcatgcctcagcctcctgagtagctgggatcacaggcgtgtgccactaccccagctaattttgtatttttagtagagatggggttttaccatgtcggccaggctgggctcgaactcctgacatcaggtgatccacccgcttcggcctcccaatgtgctaggattagaggtgtgagccatcgcacttggccaggctttggagtcttaaagctttagagccatgttggaatcttagctcttcttttgactgtgtgtatgtaggcaagtaatttaacctttctgagcttcaattttccaatctgtaaactgggaatgctatttagcccatatggttaattagatttatgtatataaaaagtgtgtatataaaacaatgcctcttattctgcatatattgtaggaaaatgactacttatttttagtaatataattaataaaagttgagatcattttgcttgtatagtactgttctctgcctttgaactttgtgtcatgagcatttccccatataattaataattatttttaactttttattattcatttatttattgtttagagacatagtctcgctctgttgcccaggctggagtccagtggtatgacagctcactgcagccttgaactcttgggctcaagtgatcctcctgcctcaccctcccataattaataatagttgaaattatttttgtgaaattatatcatatatcacttgtgctaatttctcaattttatgcattttttaatcccatgatggatatttttgtgaattagtaatttacttaacttttggtcctgttacttaggtagatttttagaaaatataattacttgtttaacaaatagacattttggggatccttgataccttttgccttagtaaatgcattattatttttttttcccatctccattccagtctctggaatctgttctgcgccacccggcagataatcgcacccagattcgagagcttggccagactctgattgatggggggatcctggatgatataatcagtgagaaactggaggctttcaacagccgatatgaagatctaagtcacctggtaagagttgggacatacatgggtgttgattaggtattgatgaagtggagctggccctaagctccatatcatagagctttaatgttggaaaaatctttaatgttggttaaagttggtaaccaatgctaacaggggcattgagggtattgaaatattcagaaaggaagaatagatctaacactctaagacagaactggatgattaaaaaaattatttttgagattacttctacttacaaacatttaattttcattaaggatcatatgatagctgtatataagaacaacaactcatactatcctagtaaatattagggccatgatatttcacataagctgctgtgaaagccatagtctcttagttcatatccaggttgtaacatacatattcgtatcacaaattagagaaagaacatttcttttataggaaggttgggtatgaatattaggtgcttccaaacacatattaaataataactgttgatgttcagcccatgaataacatcaagcttaacccaaaagtgctgtaaatagtagtttgatatgtatgtacacctatagaatttgttttaggctttggaaaaaaagagactctgatgtttgtgtattgatagacatttttcttatgttttatattcttaattggcagacattgctgattcctaaaaatgctttaaaattataataaataacacatttttatcttctgtttaatgcatcttatgggaaacctttacatttttgtatttcaacattatatatagaaagaagtaataattagtaattcagctgcatggtacataagatcctagtgggacattttcactgttatcattagtaattattatttatttataaagaaagctaaagtcttggatgaaagcttttatggtcttttcttagtggccagaatatatatattctgctatttatatttgtgttgggcaactaatgattcaatttctcctttgtgcaggcagagagcaagcagatttctttggaaaagcaactccaggtgctgcgggaaactgaccagatgcttcaagtcttgcaagagagcttgggggagctggacaaacagctcaccacatacctgactgacaggatagatgctttccaagttccacaggaagctcaggtattgccgtgcatttgagggcttttgagctgtaaagagagcttttgtaattgcctcctcaactataagagaacccctcctgctctccaaaaccgagagtcaatgggaaagattgaccttacttacagggcagcatttgggttttggagttctcttgctttctatgtgagactctggcaaaagtcttatatagtttattttattttattttattttattttatttatttatttgagacagaatcccactatgtcacccaggctggagtgcagtggcacgatcttggctcactgcaacctccgcctcctgggttcaagtgactctcctgcctcagcctcccgaataactgggactacaagcacgcgccaccacgcccggctaattttttgtagttttagtagagacggggtttcgccatgttggccaggctggtcttgaactcctgacttcaagtgatctgcctgcctcggcctcccaataatttttgtatttttagtagagacggggttttgccatattgtccaggctagtctcaaactcctgacttcaggtgatccaccttcctcggcctcccaaaatgctgggattacaggcgtgagccactgtgcctggctgaaaagtcctgtatattttaaattgtagttttcttagctgtgaagttgggacaattccttccttataaataagttgtgaacattagaaacgacaaatgcaaagcccttagcaggtgcgtcatgtacaatagtcataccatgcagtgggccatattattattattatacaaaaacgtattattattattttttagacggattctcactctgttgcccagg

SEQ ID NO: 260 - DNA, 4047 bp, Homo sapiens
tagtagagatggggttttaccatgtcggccaggctgggctcgaactcctgacatcaggtgatccacccgcttcggcctcccaatgtgctaggattagaggtgtgagccatcgcacttggccaggctttggagtcttaaagctttagagccatgttggaatcttagctcttcttttgactgtgtgtatgtaggcaagtaatttaacctttctgagcttcaattttccaatctgtaaactgggaatgctatttagcccatatggttaattagatttatgtatataaaaagtgtgtatataaaacaatgcctcttattctgcatatattgtaggaaaatgactacttatttttagtaatataattaataaaagttgagatcattttgcttgtatagtactgttctctgcctttgaactttgtgtcatgagcatttccccatataattaataattatttttaactttttattattcatttatttattgtttagagacatagtctcgctctgttgcccaggctggagtccagtggtatgacagctcactgcagccttgaactcttgggctcaagtgatcctcctgcctcaccctcccataattaataatagttgaaattatttttgtgaaattatatcatatatcacttgtgctaatttctcaattttatgcattttttaatcccatgatggatatttttgtgaattagtaatttacttaacttttggtcctgttacttaggtagatttttagaaaatataattacttgtttaacaaatagacattttggggatccttgataccttttgccttagtaaatgcattattatttttttttcccatctccattccagtctctggaatctgttctgcgccacccggcagataatcgcacccagattcgagagcttggccagactctgattgatggggggatcctggatgatataatcagtgagaaactggaggctttcaacagccgatatgaagatctaagtcacctggtaagagttgggacatacatgggtgttgattaggtattgatgaagtggagctggccctaagctccatatcatagagctttaatgttggaaaaatctttaatgttggttaaagttggtaaccaatgctaacaggggcattgagggtattgaaatattcagaaaggaagaatagatctaacactctaagacagaactggatgattaaaaaaattatttttgagattacttctacttacaaacatttaattttcattaaggatcatatgatagctgtatataagaacaacaactcatactatcctagtaaatattagggccatgatatttcacataagctgctgtgaaagccatagtctcttagttcatatccaggttgtaacatacatattcgtatcacaaattagagaaagaacatttcttttataggaaggttgggtatgaatattaggtgcttccaaacacatattaaataataactgttgatgttcagcccatgaataacatcaagcttaacccaaaagtgctgtaaatagtagtttgatatgtatgtacacctatagaatttgttttaggctttggaaaaaaagagactctgatgtttgtgtattgatagacatttttcttatgttttatattcttaattggcagacattgctgattcctaaaaatgctttaaaattataataaataacacatttttatcttctgtttaatgcatcttatgggaaacctttacatttttgtatttcaacattatatatagaaagaagtaataattagtaattcagctgcatggtacataagatcctagtgggacattttcactgttatcattagtaattattatttatttataaagaaagctaaagtcttggatgaaagcttttatggtcttttcttagtggccagaatatatatattctgctatttatatttgtgttgggcaactaatgattcaatttctcctttgtgcaggcagagagcaagcagatttctttggaaaagcaactccaggtgctgcgggaaactgaccagatgcttcaagtcttgcaagagagcttgggggagctggacaaacagctcaccacatacctgactgacaggatagatgctttccaagttccacaggaagctcaggtattgccgtgcatttgagggcttttgagctgtaaagagagcttttgtaattgcctcctcaactataagagaacccctcctgctctccaaaaccgagagtcaatgggaaagattgaccttacttacagggcagcatttgggttttggagttctcttgctttctatgtgagactctggcaaaagtcttatatagtttattttattttattttattttattttatttatttatttgagacagaatcccactatgtcacccaggctggagtgcagtggcacgatcttggctcactgcaacctccgcctcctgggttcaagtgactctcctgcctcagcctcccgaataactgggactacaagcacgcgccaccacgcccggctaattttttgtagttttagtagagacggggtttcgccatgttggccaggctggtcttgaactcctgacttcaagtgatctgcctgcctcggcctcccaataatttttgtatttttagtagagacggggttttgccatattgtccaggctagtctcaaactcctgacttcaggtgatccaccttcctcggcctcccaaaatgctgggattacaggcgtgagccactgtgcctggctgaaaagtcctgtatattttaaattgtagttttcttagctgtgaagttgggacaattccttccttataaataagttgtgaacattagaaacgacaaatgcaaagcccttagcaggtgcgtcatgtacaatagtcataccatgcagtgggccatattattattattatacaaaaacgtattattattattttttagacggattctcactctgttgcccaggctagagtgcagtggcgcgatctcggctcactgcaaactctgccccacaggttcaagcaattctcctgcctcagcctcccgagtagctgggattataggcgcccgccaccgtgcccagctaatttttgtatttttagtagagatggggtttcaccatcttggccaggctggtcttgaactcctgatgtcgtgatccacccgcctcggcctcccaaagtgttgggattacaggcataagccaccgcacctggcctacaaaaacttattaaagcttctgtggaggtcaacattatgtaaaatacgatatcatgtattacacaacgatatagaacttttgtattgtctctttttatacttaagtaaaaaaaaaaggacatcctctcccctttccaatctctttttagaaaatccaagcagagatctcagcccatgagctaaccctagaggagttgagaagaaatatgcgttctcagcccctgacctccccagagagtaggactgccagaggaggaagtcagatggatgtgctacaggtaaagaaggccaggagcttccttttacttttcaacttgttgggaattttcttcaaaaaagagaaagaattgattacttgggcaccgtttgtattctttgtgatgtaaaccatgggatgggagtgatgatgtgttgaaggttgcatcctagggcagcagaaacaaattgttgcatgtgtggaaaaatatgaaatctgattttgatagctgagatgagaaacaagagagtgagccagatttagaagttagctttatatacactttttctttaatgcagagcctctgtcagtatcgtgtggctgatgctgtgggcaggccgagcatgaattggatgcagcatcatttagttctttcatggttgatatgacattgactttcactctgaacttgtgatgaagggcattttgagttctaggttcctgaactatctttttgaacatgaagttttaattccagtgaggtcagctttatctaaatttcttatccaaatctattacttctgagattgagacactgagtgttgtaatttttgacactgggctatgc

SEQ ID NO: 261 - DNA, 4044 bp, Homo sapiens
gggtatgaatattaggtgcttccaaacacatattaaataataactgttgatgttcagcccatgaataacatcaagcttaacccaaaagtgctgtaaatagtagtttgatatgtatgtacacctatagaatttgttttaggctttggaaaaaaagagactctgatgtttgtgtattgatagacatttttcttatgttttatattcttaattggcagacattgctgattcctaaaaatgctttaaaattataataaataacacatttttatcttctgtttaatgcatcttatgggaaacctttacatttttgtatttcaacattatatatagaaagaagtaataattagtaattcagctgcatggtacataagatcctagtgggacattttcactgttatcattagtaattattatttatttataaagaaagctaaagtcttggatgaaagcttttatggtcttttcttagtggccagaatatatatattctgctatttatatttgtgttgggcaactaatgattcaatttctcctttgtgcaggcagagagcaagcagatttctttggaaaagcaactccaggtgctgcgggaaactgaccagatgcttcaagtcttgcaagagagcttgggggagctggacaaacagctcaccacatacctgactgacaggatagatgctttccaagttccacaggaagctcaggtattgccgtgcatttgagggcttttgagctgtaaagagagcttttgtaattgcctcctcaactataagagaacccctcctgctctccaaaaccgagagtcaatgggaaagattgaccttacttacagggcagcatttgggttttggagttctcttgctttctatgtgagactctggcaaaagtcttatatagtttattttattttattttattttattttatttatttatttgagacagaatcccactatgtcacccaggctggagtgcagtggcacgatcttggctcactgcaacctccgcctcctgggttcaagtgactctcctgcctcagcctcccgaataactgggactacaagcacgcgccaccacgcccggctaattttttgtagttttagtagagacggggtttcgccatgttggccaggctggtcttgaactcctgacttcaagtgatctgcctgcctcggcctcccaataatttttgtatttttagtagagacggggttttgccatattgtccaggctagtctcaaactcctgacttcaggtgatccaccttcctcggcctcccaaaatgctgggattacaggcgtgagccactgtgcctggctgaaaagtcctgtatattttaaattgtagttttcttagctgtgaagttgggacaattccttccttataaataagttgtgaacattagaaacgacaaatgcaaagcccttagcaggtgcgtcatgtacaatagtcataccatgcagtgggccatattattattattatacaaaaacgtattattattattttttagacggattctcactctgttgcccaggctagagtgcagtggcgcgatctcggctcactgcaaactctgccccacaggttcaagcaattctcctgcctcagcctcccgagtagctgggattataggcgcccgccaccgtgcccagctaatttttgtatttttagtagagatggggtttcaccatcttggccaggctggtcttgaactcctgatgtcgtgatccacccgcctcggcctcccaaagtgttgggattacaggcataagccaccgcacctggcctacaaaaacttattaaagcttctgtggaggtcaacattatgtaaaatacgatatcatgtattacacaacgatatagaacttttgtattgtctctttttatacttaagtaaaaaaaaaaggacatcctctcccctttccaatctctttttagaaaatccaagcagagatctcagcccatgagctaaccctagaggagttgagaagaaatatgcgttctcagcccctgacctccccagagagtaggactgccagaggaggaagtcagatggatgtgctacaggtaaagaaggccaggagcttccttttacttttcaacttgttgggaattttcttcaaaaaagagaaagaattgattacttgggcaccgtttgtattctttgtgatgtaaaccatgggatgggagtgatgatgtgttgaaggttgcatcctagggcagcagaaacaaattgttgcatgtgtggaaaaatatgaaatctgattttgatagctgagatgagaaacaagagagtgagccagatttagaagttagctttatatacactttttctttaatgcagagcctctgtcagtatcgtgtggctgatgctgtgggcaggccgagcatgaattggatgcagcatcatttagttctttcatggttgatatgacattgactttcactctgaacttgtgatgaagggcattttgagttctaggttcctgaactatctttttgaacatgaagttttaattccagtgaggtcagctttatctaaatttcttatccaaatctattacttctgagattgagacactgagtgttgtaatttttgacactgggctatgcagttcacttaggtgatcgggtaccctcactgagattcattaggagttttttattttgggtcatatttctgaatttttttcttttggtactttatggtacaaatttttagtagtatctgttatgctcatgatgagagagataatcatcctgatgggaattgcatattttcatttctgcaaacagaggaaactccgagaggtgtccacaaagttccagcttttccagaagccagctaacttcgagcagcgcatgctggactgcaagcgtgtgctggatggcgtgaaagcagaacttcacgttctggatgtgaaggacgtagaccctgacgtcatacagacgcacctggacaagtgtatggtgaggcttttgggtgattggcacatccagtggctttttcagcagctgttatggcttggtctagcaagtacatgcctagtgtgtccagtgatcactagtctacagtgtgctaaacataaggattgatgatggaaaacgtgttaaaaaataagaagtgtggtctttccctccaaagaaattagaagagataagagagatagctaaggaaactagaatagacatgtatataacatgatgacaaaaaccaaaacaaaagaaatacagcttaatcaccatgtgaagttaggagggcttcagcagagtgtgactaataagcaaagttttcaaggataaatttgaattagctagaagaaccatacttagaatggatatcgtaaaaattccattttctaggaaaataaaaatttcaatagaaatttaaaccttaagataggaaagaagaaatgatatataaggccttattacttttttagtcttgaactttataattcaattgaatagaaatttaaaaataatgtggctaaggggacacaatcttagaattagtgttctgcttgagaatcacagaacttaagatgagactctttaggacaggagaggtatagggacagttctttgtgcttttcaaaacaaaggataaattttaatatatatgtgcatgtatgtaagtatttatttgattattgtgacataatggtaatcagagaaagtgctgtccttgacttcatggaacatacatagttcaggggtctgttacatgacagcgtcctatgagatgttgagatgatgatgtataggtgtcaagagaagctgtttagaataaagctttttggtttcaggtaactaggaagaagacagctctgaatttgacctacagaactacgatttctttttttatatttaaatttatttttatttttaatttttgaagacttttaggttcaggaagtacatgtgcacgtttgatacatggatatattgtatgatgctgaggtttgggcttcgactgaacccatcacccaaataataaatgtagtacccaattggtagtttttcagctcttgcccctttc

SEQ ID NO: 262 - DNA, 4046 bp, Homo sapiens
caaaaaccaaaacaaaagaaatacagcttaatcaccatgtgaagttaggagggcttcagcagagtgtgactaataagcaaagttttcaaggataaatttgaattagctagaagaaccatacttagaatggatatcgtaaaaattccattttctaggaaaataaaaatttcaatagaaatttaaaccttaagataggaaagaagaaatgatatataaggccttattacttttttagtcttgaactttataattcaattgaatagaaatttaaaaataatgtggctaaggggacacaatcttagaattagtgttctgcttgagaatcacagaacttaagatgagactctttaggacaggagaggtatagggacagttctttgtgcttttcaaaacaaaggataaattttaatatatatgtgcatgtatgtaagtatttatttgattattgtgacataatggtaatcagagaaagtgctgtccttgacttcatggaacatacatagttcaggggtctgttacatgacagcgtcctatgagatgttgagatgatgatgtataggtgtcaagagaagctgtttagaataaagctttttggtttcaggtaactaggaagaagacagctctgaatttgacctacagaactacgatttctttttttatatttaaatttatttttatttttaatttttgaagacttttaggttcaggaagtacatgtgcacgtttgatacatggatatattgtatgatgctgaggtttgggcttcgactgaacccatcacccaaataataaatgtagtacccaattggtagtttttcagctcttgcccctttcctccttccctccttttggagtcccattgtctttgctttccatctttatgtgcatgtgtgcccattgtttaactcccacttataagtgagaacatttagtatttggttttctgttcctgaattaatttacttaggataatggccttgagctgcattcatgctgctgcaaaggacatgatttcattttttatggctgtgtagtgttccgtggtgtatttgtaccacgttttctttatccattcccccattgatgggcacctagattgatgacatgtctttgctattgtgtgtagtggtgtgataaacacgggagtgcatgtgtccttttggtagaacgattatcctcctttacttatatacccagtaataggatttctgggttgaataataattctatgtttagttctttgagatatttccaaactgctttccctaggggctgaactgatttacaatcctaccaacagtgtatggtgttcccttttctctgcagccttgccagcatctgttgttttttgactttttaataatggtcattcagactggtgtgagatagtatcttattgtggttttgatttgcatcagaaatctgtttacttatagttatatacatcttgatatatcgagttttgtattttttatcatacaaattatatatgttcattgtggtagacttagtacttctgagaaatagaaataaatgttaataattccaaatccaacagacagcagtagccagtgttggcttgttttagtcataacatgcaagattttttaaaaatgtaattttaattgtgataaacattctgtttttagtcctaatgttttcccattttatgtaggaaaaatatttatattatcaagtactttcataagcatttgtctgagattttgaaagaatgagcataaactctattagtttattttcttgtcagatttgaagaagttattacaagcttgatttcatttgactcgaccttcagaccaaatctgagaaagatgatggcctttgatcaccatagttaggtcttggctgtcaatctgtgtaagctgtggtctgacatgatgccagttggcaagttgtcaccacagtgtgtaatttgtctttttctttgtttgttttaaagaaactgtataaaactttgagtgaagtcaaacttgaagtggaaactgtgattaaaacaggaagacatattgtccagaaacagcaaacggacaacccaaaagggatggatgagcagctgacttccctgaaggttctttacaatgacctgggcgcacaggtgaggagagcagccccacagctcatctctctgtctctctctctctctctctcaatctctctctctctctcgttctctctcatgtatttttaaatttcattttttggaaaatgcatgtttgaaaattatgagattcatacgtgttttcaatttattgtaataattgttatatttctttaaatgtatgtggtaatattacagtgattcatagttacatagaaatttatttttggctaggcacagtggctcacgcctgtaatcccaggtctttgggaggctgagtcaggtaatggcttgagcccaggggtttgagaccagcctgggcaacatgatgaaaccttgtctctacaaaaaaatacaaatgaaaacctccaaaaacaaaacaaatttccaaaaaaaaattagccatggtggtgagtatctgtagtcctagctacctgggaggctgaggtgggagagctgcttgaacctgagaggcagaggttgcagtgagctgagatcacaccactacactccagcctaggaacagagtgagacactgtttttaaaaaaaatttatttttaatatttaattcaggctaatatttatactttcaatggctactgatattccataaattattctaaggatactacaagtaatatatgttcattgtggtagacttagtgtgtctggaattggtgggttcttggtctcactgacttcaagaatgaagctgtggaccctcgtggtgagtgttacagctcttaaggtggcgcatctggagtttgttccttctgatgttcggatgtgcttggagtttcttccttctggtgggttcatggtcttcctggctcaggagtgacgctgcagacctttgcagtgagtgttacagctcttaaggcagcgcatctggagttgttcgttcctcccagtgggcttgtggtctcgctggcttcaggagtgaagctgcagacctttgcagtgagtgttacagctcataaaagcagtgtggacccaaagagtgagcagtagcaagatttattgcaaagagcaaaagaacaaagcttccacagtgtggaaggggacccgagcgggttgccactgctggctcgcgcagcctgcttttattctcttatctggccctacccacatcctgctgattggtagagacgagtggtctgttttgacagggcgctgattggtgcgtttacaatccctgagctagacacaaaggttctccatgtccccaccagattagctagatacagagtgtggacacaaaggttctccaaggccccaccagagtagctagatacagagtgttgattggtgcattcacaaaccctgagctagacacagggtgctgattggtgtgtttacaaaccttgagctagatacagagtgccaattggtgtatttacaatcccttagctagacataaaggttctctaaggccccaccagagtagctagatacagagtgtggattggtgcactcacaaaccctgagctagacacagggtgctgattggtgtgtttacaaaccttgagctagatacagagtgccgattggtgtatttacaatccctgagctagacataaagactctccacgtccccaccagacccaggagtccagctggcttcacccagtggatcccgcacccgggctgcaggtggagctgccttccagtcccgcaccgtgggcttgcactcctcagcccttgggtggtcaatgggagtgggcgccgtggagcagggggtggcactcatcagggaggctccggccgcacaggagcccatggagggggtgggaggctcaggaatggcgggctgcaggtcccgagccctgccccgcaggaaggcagctaaggcccggtgagaaattgagcgcagcgccggtgggctggcactgctgggggacccagtacaccctccacagccgctgg

SEQ ID NO: 263 - DNA, 4043 bp, Homo sapiens
ttaatttttgaagacttttaggttcaggaagtacatgtgcacgtttgatacatggatatattgtatgatgctgaggtttgggcttcgactgaacccatcacccaaataataaatgtagtacccaattggtagtttttcagctcttgcccctttcctccttccctccttttggagtcccattgtctttgctttccatctttatgtgcatgtgtgcccattgtttaactcccacttataagtgagaacatttagtatttggttttctgttcctgaattaatttacttaggataatggccttgagctgcattcatgctgctgcaaaggacatgatttcattttttatggctgtgtagtgttccgtggtgtatttgtaccacgttttctttatccattcccccattgatgggcacctagattgatgacatgtctttgctattgtgtgtagtggtgtgataaacacgggagtgcatgtgtccttttggtagaacgattatcctcctttacttatatacccagtaataggatttctgggttgaataataattctatgtttagttctttgagatatttccaaactgctttccctaggggctgaactgatttacaatcctaccaacagtgtatggtgttcccttttctctgcagccttgccagcatctgttgttttttgactttttaataatggtcattcagactggtgtgagatagtatcttattgtggttttgatttgcatcagaaatctgtttacttatagttatatacatcttgatatatcgagttttgtattttttatcatacaaattatatatgttcattgtggtagacttagtacttctgagaaatagaaataaatgttaataattccaaatccaacagacagcagtagccagtgttggcttgttttagtcataacatgcaagattttttaaaaatgtaattttaattgtgataaacattctgtttttagtcctaatgttttcccattttatgtaggaaaaatatttatattatcaagtactttcataagcatttgtctgagattttgaaagaatgagcataaactctattagtttattttcttgtcagatttgaagaagttattacaagcttgatttcatttgactcgaccttcagaccaaatctgagaaagatgatggcctttgatcaccatagttaggtcttggctgtcaatctgtgtaagctgtggtctgacatgatgccagttggcaagttgtcaccacagtgtgtaatttgtctttttctttgtttgttttaaagaaactgtataaaactttgagtgaagtcaaacttgaagtggaaactgtgattaaaacaggaagacatattgtccagaaacagcaaacggacaacccaaaagggatggatgagcagctgacttccctgaaggttctttacaatgacctgggcgcacaggtgaggagagcagccccacagctcatctctctgtctctctctctctctctctcaatctctctctctctctcgttctctctcatgtatttttaaatttcattttttggaaaatgcatgtttgaaaattatgagattcatacgtgttttcaatttattgtaataattgttatatttctttaaatgtatgtggtaatattacagtgattcatagttacatagaaatttatttttggctaggcacagtggctcacgcctgtaatcccaggtctttgggaggctgagtcaggtaatggcttgagcccaggggtttgagaccagcctgggcaacatgatgaaaccttgtctctacaaaaaaatacaaatgaaaacctccaaaaacaaaacaaatttccaaaaaaaaattagccatggtggtgagtatctgtagtcctagctacctgggaggctgaggtgggagagctgcttgaacctgagaggcagaggttgcagtgagctgagatcacaccactacactccagcctaggaacagagtgagacactgtttttaaaaaaaatttatttttaatatttaattcaggctaatatttatactttcaatggctactgatattccataaattattctaaggatactacaagtaatatatgttcattgtggtagacttagtgtgtctggaattggtgggttcttggtctcactgacttcaagaatgaagctgtggaccctcgtggtgagtgttacagctcttaaggtggcgcatctggagtttgttccttctgatgttcggatgtgcttggagtttcttccttctggtgggttcatggtcttcctggctcaggagtgacgctgcagacctttgcagtgagtgttacagctcttaaggcagcgcatctggagttgttcgttcctcccagtgggcttgtggtctcgctggcttcaggagtgaagctgcagacctttgcagtgagtgttacagctcataaaagcagtgtggacccaaagagtgagcagtagcaagatttattgcaaagagcaaaagaacaaagcttccacagtgtggaaggggacccgagcgggttgccactgctggctcgcgcagcctgcttttattctcttatctggccctacccacatcctgctgattggtagagacgagtggtctgttttgacagggcgctgattggtgcgtttacaatccctgagctagacacaaaggttctccatgtccccaccagattagctagatacagagtgtggacacaaaggttctccaaggccccaccagagtagctagatacagagtgttgattggtgcattcacaaaccctgagctagacacagggtgctgattggtgtgtttacaaaccttgagctagatacagagtgccaattggtgtatttacaatcccttagctagacataaaggttctctaaggccccaccagagtagctagatacagagtgtggattggtgcactcacaaaccctgagctagacacagggtgctgattggtgtgtttacaaaccttgagctagatacagagtgccgattggtgtatttacaatccctgagctagacataaagactctccacgtccccaccagacccaggagtccagctggcttcacccagtggatcccgcacccgggctgcaggtggagctgccttccagtcccgcaccgtgggcttgcactcctcagcccttgggtggtcaatgggagtgggcgccgtggagcagggggtggcactcatcagggaggctccggccgcacaggagcccatggagggggtgggaggctcaggaatggcgggctgcaggtcccgagccctgccccgcaggaaggcagctaaggcccggtgagaaattgagcgcagcgccggtgggctggcactgctgggggacccagtacaccctccacagccgctggcccggtgctaagtccctcattgcctggggccggcagggccagcctgctgctccgagtgcggggcccgccaagcccacccggaactccagctggcccacaagcgtggcgcgcagccccggttcccgctcgcgcctctccctccacacctccctgcaagctgagggagtgggctctggccttggccagcccagaaaggggttcccacagtgcagcggtgggctgaagagctcctcaagtgctgccaaagtgggagcccaggcagaggaggcgccgagagcgagcgagggctgtgaggactgccagcatgctgtcacctctcattagtacttcaaagaaatacaagggaaaaaataaatgttaataattccaaatttcaatggatagcagtagccggtgttggcttttttctagtcgcaacatgtaagatttttctaagtgtaattttaattgtgagaaacattctgtttttagtcctaatgttttcccatttcatgtaggaaaaatgggaaataataatccctgtaaaaactcaagttgttggtccttagatttctaaattgaacagtctaccgagaaatgttaaaacatcagggctctagtaaataaccagtggcaagaagttcacattaatctaccaggatttgaaatcctggcaagaaatatctctaatttgggca

SEQ ID NO: 264 - DNA, 4060 bp, Homo sapiens
tctggcttgatgatgtggatggtgtggccattgagatgggtgctgtaagaaaagatagaggaccgggtgcggtcgcttatgcctgtaatctttgcacgttgggaggccaaggtggtggatcacctgaggtcaggagtttgagaccagcctggtcaacatggcaaaaacccgtctctactcaaaaaaaaaaaaaaaaaattagctgagtgtggtagtatgtgcctgtaatcccagctactcgggaggctgaggcaggagaatcacttgaacctgggaggctgaggttgcagtgagtcaagattgtgccactgcactccagcctgggcaacaagagtgaaaactctgtctcaaaaaaaaaaaaaggtagaagcatgcagaaatcacaggtatgtattggacatgttgacattttaagtacctttgagaatgttaattggaaatgtcgggtactcacatgattattcaggtctggagaatatatctggactgaagaggtggattttatgagtcatctgcatagaggtcataattaaagtaatcagggatgatagattgtctaggaacaggatatagtgaaagaagagggccctcaaccaagtcttaagaattacatcatttagtaagaaatctcaggaagatgagcttgcaaaagaaactaatgtaagtagcaagaagtggtagggacacagttgagtactaggtctggaaagctaggggaagatggtattttgacagagtgcagttacctgttttggatattttgaaagttaaatatgatgtccacataaacatattaattagatcagttgccattggggtcattattgaacttagcaagggcaatgtctgggagtgatggtggtagaagccagaatggcatggctcaatccaaagattgtaccaccctggccttggccttaacctctttaagtttcattttcattatccataaagtagaaagaggctttgtgaattttattgcatacgtgtgtaagattccttagcacaacacggaagctgtattaagagcttggtaaatgttagttaagttcatttgttttctgtcaacaacaatgagagcaaaataataataaggtttggtttgtatagtcgtgtactgcattttaagttaaagtggttaattataaaacatataattgtgaaaatggtgctattttcccctcaagttactataataccgtatttttccttcatggagaggattctaagatatcttatgttcaaaattataatagatactagtgatttttcaactttatttctgcccttttatgtgtgtttttctcgcttaatacacataacaatcttttttttttttgagacggggtcttgctctgttgcccaggctggagtgcagtggcaggatcacggctcactgcagccccagcctccagggctcaagcgattctcccacctcagcctactgaccagctggaactacgagcacgcaccaccatactggctaattttttgtattttttacaaaatgaggtctttcattttgtagaaaatgaggtcatgtttcccaggctggtcttaaactcttggactcaaaagatttgcctgcctcggcctcccaaagtgctgggattatagacatgagccactgtgcccagcctcataccaatcttttgagggctatacctctgccagtatcacttaggaaattaatgatagagctaagatgaaaacccaggattgcctggcacttaaccactacagcatattgcctccttgcagaaatgcaagcttagaggattctaaggtgctaagacaaaggttatgtatgtcttgggggttatatatgaatcagtttggatctttagttaacattctgattcattctcatttatgttcattcccatctcagtctcagtctctccctgcctctctccgtctcaggtgacagaaggaaaacaggatctggaaagagcatcacagttggcccggaaaatgaagaaagaggctgcttctctctctgaatggctttctgctactgaaactgaattggtacagaagtccacttcagaaggtctgcttggtgacttggatacagaaatttcctgggctaaagtaagttgcagttcagatgaaacaccagcatgatgccagcgtaacatggcatttgttcgggcgacctggttggataccatgtccctccattttatattaaatctagccttttcttttttgcattgtttttccacttctctgtcctaagaaaaaatattttaaaaataatgattatattttattttctttataatttctacttttagattaaggggtacacatataggtttgttacatggatatattgtgtaatgctgaggtttggggtatgaatgatcccatcacccaggtagtgagcatagtacccactaggtagtttttcagctcatgcctccctctgtttctcgcccctctactagtccccagtgtttatcgttcccttctttatggccttgcgtacccaatgtttagcccccacttgtaagcgagaacgtggtaattggtttcccattcctgcattaattcacttaggataatggcctccagctgcaaccatgttgctgcaaaggacatgatttcattcttttttatggttgtatggtactccatggtgtatatgtatcacattttctttatccaatccaccattgatgggcacctaggttgatgacatgtccttgctcttgtgaatagtgctgatgaacatatgagtgcatgtgtctttttggtagaacagtttattttcctttgcctatatacccagtaatcagatttctgggtcagtaatcagaattctgtttgaagttctttgagaaatttctaaactgctttccacagaggctgaactaatttacattcccaccaacagtataaaagtgttcctttttctctgcaaccttgtcaacatctgttattttttgactttttaataatagctattctaaatggtgtgagatggtatctcattgtggtttcaatttgcatttctctaatgttagtgatgttgagcattttttcgtgtgttgttggctgctagtatgtcctttttgaagtgtctgttcattttatttgcccactttttaatggggttatttgtaaaacagctcttttaataagatatttttatcctgattccaaaagcattacattcatggatcatcaaggcctttataggtattatttttatatagtacttaaaagcctaattcaccacctttaaaatcaatgacacatatttacagagtgtttacaaagaattgtgctgagtttaattcttctttaataacattttaaaaccaataagtaatctttctattgcaaactttcagatgtaaagaacttaggaatagaattttaaaaaatcaatacaagagttttctttaaccctgtactttgaaatcacagagattagaaagttgatttgctggttctggcttctgcagtagagaaagaattgaatggaacatgagtggttcttttaacaaggcattctgttttcctaaatctctttcctgagaaagaagcgagtatactagtgggaagtgctgaatataaatgatcaatactgtgactgatgtttatataaagccacaagtatcagtttgacaccctctacagctctacacgtttgctgtgggccttgaggagaaggtgctgagaggttgtggggtgacacaactcctgcttactttgaatgctctgtggagatgacagctgggagaaagttaagatagtagacactggaaagactattctcagtttagaaaaaagctcatgaaaagcgtgatcatgccatgagcagtgtgagtgtaaaggaagtgaagaaaggaatgtatgagggaaatgagcattgcaagtcatcggtgtgttgtggttgaatgcaaaacaaaggcaccaaactttattgttgttaaatttaagtttttcaaggacatattatcatcctcgtgcagtatactttgaaaatcattactttttaaattagtaacataagtaatagaagctatttgaatgaaatttgcctagt

SEQ ID NO: 265 - DNA, 4050 bp, Homo sapiens
tgttaaattcttaaattctattggaaattttgatttgaattgccttgaattcatacatttgtgtagtgcagaattgatatctttgttatattaattctattcggtaacatatatgtctcatttttgtcctaaattctttcacattcctacataatgttttgatttttttctttataaacattattcatatatgcacaggagtttattcctacatatctatttttattgctatgtaaaaatatacttttcggtttttttacagagtgcttattgttggtacataggtgatattgattttatatattcaatttttaaacatccatgttcatatactcataaattcaatttgtttttcagctgattctcatagcttttttaggtaaagactcaaagcaatgaaaaatttgtttcttttggaacaatatgctcttaagtttccatttaatcttatttcagaattgaaatgataaagatgatatatacaagtcacaaattcacagcacattctcttcattagagtaaatcaaatgaaacatcagtatatattaataaccaccatctttttatcactgtcttttcagatttaaggaacatgcagatttcaccacattttaatgtatttgcacttaaagattatgtaaaattattttcaatgcaaagcttaaataaataatattttcatttctgaatactgtttttattccataacttaaatataactattttcaatgtaatcttttttactgtaaaaaagtatgtgtactatttagatgtaattacttgtagttcattattttttatagttcttaaatgctattctagtcaatcagtacatgcccactgaagaaatgaaagattcttattaataattgctgagagcatagctattgggtatcctttattttctccccccttgctagagaataatattggaaagtagtatttcagttctgtcataaatatgccagtaattgacatggccaagtgagtgtttaaacctggactcatttgtgaatttgtaattggtatgctttccaaggtgtgatttaatgtagaaatataaacttgagctccttaaaatgattggtttaaatgttgatttaaaaaatggtcaataatagtagcagtagggtagatacatgcatattgctttttgattgaaagagctttgtagttttaattgtggaactcatgctctctctataattctgtgactatatactttgcctggtgaaacttacgaatgtgccgatcactttatcatcataccatccagagtattatctttgcacttatgacagttgtaagaccaaagcttagacttgctgctctcttgtgagttacttacatgaaatgtttttttgtaatgtttattcagtatattatatgtgaaatcacccagctgtaagatgttatccttgcaagtacctatagtacacatcgatagtttcctctggtaatctaggagataaattcattgtgaatttttttaagttgtgagttctaggatccttctgctttgccagcttgtagttactgaaaatgaaattgagcctttacatttagagtgatgatgaaggtaattggcattcatatgtaataaatggatttatatttaaataaatgaaataattgctttcccacagctgagtgtgttacactcactggtatttgttgaattacacattttgttttccatttggaacttaagaattctcactatgttaataagtttgggaattttgtaaactttgacattgtaaattatatagggagtcatggactactttgtatatgtggcagaaaagtttttaataatttaaggttgtatatacttttataatattctgaagcatcaagtaggtcttggtgtttttattttctagaatgttctgaaggatctggaaaagagaaaagctgatttaaataccatcacagagagtagtgctgccctgcaaaacttgattgagggcagtgagcctattttagaagagaggctctgcgtccttaacgctgggtggagccgagttcgtacctggactgaagattggtgcaataccttgatggtatgtctcaggaaaaagtaaatgatgaaatcttctcctctcttctagttattttttaaatgaatacaactttgattaaatttcaaatcctgtttactgtgtgtcacagtgatgttttgcttgtgaattaatttcattagactaggttttattttttctttggaaaggtaataactagaaagaatttacagtgtttctaaatattcatgatctgcatggaatgaggtactttcatattttagtaaatgcaccttatttgtttcattttaatgatttcatattgtatttgattttcgtactatcagaagctatttttatataaaatcttcatagtgtttgaataatggcatactggttaagagcacaggctctagcatctgacggcctatgtaaaaattttcattactagcttggtaacactggtaaagttacttaaacattctctaaacctcagttgtttaatttgtaaaatggacattattatatctatctcatacagttttgcaatgattgattatgagccttaaacatgtagtgctcttaaataactatatgcaaaacaaccaattttagattttgctatgattataattattaaatattgtatatgtgttagtctttggttatgccactgctctgtaaatttgcatctcatggaaatagttaccatttaatttttatatggttttatgttcctatgatactaattgtgaatatatggccaccccaccctcccctgctgaggaaggcattgtcatttataattttttttaattctgaaatacctgagataggacttttatcaaatttatagaattactaggtaatggatagagacataaaaaatacattatcatgtgtttgaatatttatttaaattcctcaggatgtgtagggcagtgaagagcatgggctttgctcttgatctctaacagatttatatccacagtccatgacttattatctgtttaactttagctaagttacttaatgttactaagcttaaatttccatatatacagaatgagaacaaaagtatatacctaacagagttgttaaatattgaatataatagtgaatatgagattcttggcacatagaatatgctcattaaatattttatatattaatttttaattactagctttatttcacattcttatggcccttatttctgtattcttcagtctacacctttcaaactctccattcaagcagtatctttctagtgctgttagaacatttgatttacctgcttaataggggtaaacaagtctggcactcatcagttcttcctacttagaatccagatcactgttgatattttctcatatcatttattagttcacattttctttttttaaaaatgtttattttaagttcaggggtacaagggcaagtttgttttatttttatattgtttatttgttcactttttttttttttctgaggctgggtgtcagtctgtcacccatgctggagtgcagtggtatgcaacctcgacctccccaggctcaggtgatccttccacctcagccttgagagtagctgggactacaggcatgcgccaccacacccggctaatttttttattttttgtagagagggggtttcaccatgttgtccaggctggtcttgaattcctgaggtcaagtgatcctcccatcagggcctcccaaagtactggattacaggcgtgagccaccacacccagcctacattttcttttttcaactatgtttcatattatagattaatgatttctttctttgtaaaaacttttactgtctaagcattttccagtttcttttatcccacaaaatataattgctaaaggttaatttcatcataagtctcgttaccctttttggtcacactctaacttcttgccttagattaactgtttttcccagtcataatctgcttaactcttgcttctgttttcaaatctgttctgtcaagcacatttcatgtcctgcttcag

SEQ ID NO: 266 - DNA, 4046 bp, Homo sapiens
ttgaatatttatttaaattcctcaggatgtgtagggcagtgaagagcatgggctttgctcttgatctctaacagatttatatccacagtccatgacttattatctgtttaactttagctaagttacttaatgttactaagcttaaatttccatatatacagaatgagaacaaaagtatatacctaacagagttgttaaatattgaatataatagtgaatatgagattcttggcacatagaatatgctcattaaatattttatatattaatttttaattactagctttatttcacattcttatggcccttatttctgtattcttcagtctacacctttcaaactctccattcaagcagtatctttctagtgctgttagaacatttgatttacctgcttaataggggtaaacaagtctggcactcatcagttcttcctacttagaatccagatcactgttgatattttctcatatcatttattagttcacattttctttttttaaaaatgtttattttaagttcaggggtacaagggcaagtttgttttatttttatattgtttatttgttcactttttttttttttctgaggctgggtgtcagtctgtcacccatgctggagtgcagtggtatgcaacctcgacctccccaggctcaggtgatccttccacctcagccttgagagtagctgggactacaggcatgcgccaccacacccggctaatttttttattttttgtagagagggggtttcaccatgttgtccaggctggtcttgaattcctgaggtcaagtgatcctcccatcagggcctcccaaagtactggattacaggcgtgagccaccacacccagcctacattttcttttttcaactatgtttcatattatagattaatgatttctttctttgtaaaaacttttactgtctaagcattttccagtttcttttatcccacaaaatataattgctaaaggttaatttcatcataagtctcgttaccctttttggtcacactctaacttcttgccttagattaactgtttttcccagtcataatctgcttaactcttgcttctgttttcaaatctgttctgtcaagcacatttcatgtcctgcttcagtacatcttgctgtggtctgtgccagatgtaatattaagggctggtgatactgaggtaaggatacaaaggcactgtcctttgagcagagcatacagaatctttttcaattcatattttcatcattttaaaaaattattccttaaatgagttttttaaaaatatgggccaggtgtggtggcgcacacctgtaatcccagcactttgggaggctgaggaaggtggatcacaaggtcaagagatcaagacttcctggccaacatggtgaaaccccgtctctactaaaaatacaaaaattagctgggtatggtggtgcaagcctgcagtcccagctactcgggagactgaggcaggagaatcacttgaacctgggaggtggaggttgcagtgagctgagattgtgccactctactccaggctggtgacagagcaagactccatctcaaaagaaaaaagaaaaaaagattgaagagggcaaatcagatcagttgtaatataagaataaggaataagagatgaacttgcattgaaattgaaaaagaaactttcaccttttattctacttcaactttttattgtgctgaggtctaaatcaaataaatttaaaaagtgttaagcaccatagatgtgcatttttaggaataagatgagttattcactgaagaagagctctgcaggaaggtgaaagctctcctttaaattcatggtacagtttgctctttgaaggtcttttaaatctcttttaagattatcatcttaaatatttcatatggttatgtaagcattttattaattcctttgtagaaccatcagaaccagctagaaatatttgatgggaacgtggctcacataagtacctggctttatcaagctgaagctctattggatgaaattgaaaagaaaccaacaagtaaacaggaagaaattgtgaaggtagcaaacacagacatcagtaacgcttttgggagtggcatgttttgttgtcatgttttctcttctggaatgctctaagttacttagctctcattcctcccaagcattagattcattaacatttattttgatgggagaaactgagacaataagagacaaaataagagacgaacttgaaattgaaagacttgtaagagatttcagcacaatcaaccggagtaagacctattcacataagatgccaatgagtcttgctgattgctgacttttgtattctccattgagtgctgcttacttctgtattctccagtgagtcttacttacttttgtattctccaatgagtctgtcttacttctgtactctccaatgagtcttacatacttttgtattctccagcgagtcttacttctgtattttccaatgagaattacttacctctgtgttctccaatgagtcctatgtgaacagctctcacctggttgattatgctgaaatctcttactggggatcccagatatttatttaaactacctttccttctgtataagcatcacactcatgtttgggtttgatttttcccatgagataattttgtgttttcttataattagcgtttagtatctgagctggatgatgccaacctccaggttgaaaatgtccgcgatcaagcccttattttgatgaatgcccgtggaagctcaagcagggagcttgtagaaccaaagttagctgagctgaataggaactttgaaaaggtgtctcaacatatcaaaagtgccaaagtgagtaattatgcttttagagtaaaccatttttcctatgggtatgtatctaaatgatagtcatacagtacatacatcaacaattttgttttattattttaattttattgttttctctctctgtcaccgaggctggagtgcagtggcatgagctcactgcaacctccgccttctgggtgcaagctattctcctgcctcagccacccaagtagctgggatttccggcaactgccaccacacccagctaatttttgtgttttttttaggagagatagggtttcaccatcttggccaggctggtcttgagctgctgacctcaagtgatctgcccgccttggcctcccaaagtgctggaattacaggtgtgagctgctgcacccggccaacaatttttaaattaaaatgtttttaatcactttttctttgaatggagcatttgtccgtatttatttgtgattgtgcatatgaaggagagaaaacaagcaattagtattgaagaaaataacctatttgagaaaaggtttcaaagactcagtcaaaggttagaattggttatgaaatgatgaaactaattcccaagctagggatgaatattaaaccctttattttatggtcacactctatatatgtcttcacattgcacacaccacagaacttgtttttttttttgttttatatgacgacaaatctaaaagttacagataatttcacagtttaatcctaatgtaggaaagtactacctgattttataaatttaataaagagctttagacatttaattaacagggtaataaataggacctttatgagagtgctagttttcccacacttagccaaccccagatggtatttatctgcatttagttttattaaaattgttttattgagttttatttaaacaaatataaaatttttctacgtagatgttatctgaaaagatgacattgagaaatatgcacttctttgacgtttgtgtatgaaaatccaaggggaattctactgaggaaacttaactgggagacattctgtgaggtgtccctgccctgggggctgggtggctgttcttcctttctgtggccatggtaaggatagtttctggatcatggccatagtttcctgctatgctcgcatgtggtctccaaatccacgccacaacactctgggcagccacaatgaattgcaatactacgtcacatccctggctagagtt

SEQ ID NO: 267 - DNA, 4045 bp, Homo sapiens
gagggggtttcaccatgttgtccaggctggtcttgaattcctgaggtcaagtgatcctcccatcagggcctcccaaagtactggattacaggcgtgagccaccacacccagcctacattttcttttttcaactatgtttcatattatagattaatgatttctttctttgtaaaaacttttactgtctaagcattttccagtttcttttatcccacaaaatataattgctaaaggttaatttcatcataagtctcgttaccctttttggtcacactctaacttcttgccttagattaactgtttttcccagtcataatctgcttaactcttgcttctgttttcaaatctgttctgtcaagcacatttcatgtcctgcttcagtacatcttgctgtggtctgtgccagatgtaatattaagggctggtgatactgaggtaaggatacaaaggcactgtcctttgagcagagcatacagaatctttttcaattcatattttcatcattttaaaaaattattccttaaatgagttttttaaaaatatgggccaggtgtggtggcgcacacctgtaatcccagcactttgggaggctgaggaaggtggatcacaaggtcaagagatcaagacttcctggccaacatggtgaaaccccgtctctactaaaaatacaaaaattagctgggtatggtggtgcaagcctgcagtcccagctactcgggagactgaggcaggagaatcacttgaacctgggaggtggaggttgcagtgagctgagattgtgccactctactccaggctggtgacagagcaagactccatctcaaaagaaaaaagaaaaaaagattgaagagggcaaatcagatcagttgtaatataagaataaggaataagagatgaacttgcattgaaattgaaaaagaaactttcaccttttattctacttcaactttttattgtgctgaggtctaaatcaaataaatttaaaaagtgttaagcaccatagatgtgcatttttaggaataagatgagttattcactgaagaagagctctgcaggaaggtgaaagctctcctttaaattcatggtacagtttgctctttgaaggtcttttaaatctcttttaagattatcatcttaaatatttcatatggttatgtaagcattttattaattcctttgtagaaccatcagaaccagctagaaatatttgatgggaacgtggctcacataagtacctggctttatcaagctgaagctctattggatgaaattgaaaagaaaccaacaagtaaacaggaagaaattgtgaaggtagcaaacacagacatcagtaacgcttttgggagtggcatgttttgttgtcatgttttctcttctggaatgctctaagttacttagctctcattcctcccaagcattagattcattaacatttattttgatgggagaaactgagacaataagagacaaaataagagacgaacttgaaattgaaagacttgtaagagatttcagcacaatcaaccggagtaagacctattcacataagatgccaatgagtcttgctgattgctgacttttgtattctccattgagtgctgcttacttctgtattctccagtgagtcttacttacttttgtattctccaatgagtctgtcttacttctgtactctccaatgagtcttacatacttttgtattctccagcgagtcttacttctgtattttccaatgagaattacttacctctgtgttctccaatgagtcctatgtgaacagctctcacctggttgattatgctgaaatctcttactggggatcccagatatttatttaaactacctttccttctgtataagcatcacactcatgtttgggtttgatttttcccatgagataattttgtgttttcttataattagcgtttagtatctgagctggatgatgccaacctccaggttgaaaatgtccgcgatcaagcccttattttgatgaatgcccgtggaagctcaagcagggagcttgtagaaccaaagttagctgagctgaataggaactttgaaaaggtgtctcaacatatcaaaagtgccaaagtgagtaattatgcttttagagtaaaccatttttcctatgggtatgtatctaaatgatagtcatacagtacatacatcaacaattttgttttattattttaattttattgttttctctctctgtcaccgaggctggagtgcagtggcatgagctcactgcaacctccgccttctgggtgcaagctattctcctgcctcagccacccaagtagctgggatttccggcaactgccaccacacccagctaatttttgtgttttttttaggagagatagggtttcaccatcttggccaggctggtcttgagctgctgacctcaagtgatctgcccgccttggcctcccaaagtgctggaattacaggtgtgagctgctgcacccggccaacaatttttaaattaaaatgtttttaatcactttttctttgaatggagcatttgtccgtatttatttgtgattgtgcatatgaaggagagaaaacaagcaattagtattgaagaaaataacctatttgagaaaaggtttcaaagactcagtcaaaggttagaattggttatgaaatgatgaaactaattcccaagctagggatgaatattaaaccctttattttatggtcacactctatatatgtcttcacattgcacacaccacagaacttgtttttttttttgttttatatgacgacaaatctaaaagttacagataatttcacagtttaatcctaatgtaggaaagtactacctgattttataaatttaataaagagctttagacatttaattaacagggtaataaataggacctttatgagagtgctagttttcccacacttagccaaccccagatggtatttatctgcatttagttttattaaaattgttttattgagttttatttaaacaaatataaaatttttctacgtagatgttatctgaaaagatgacattgagaaatatgcacttctttgacgtttgtgtatgaaaatccaaggggaattctactgaggaaacttaactgggagacattctgtgaggtgtccctgccctgggggctgggtggctgttcttcctttctgtggccatggtaaggatagtttctggatcatggccatagtttcctgctatgctcgcatgtggtctccaaatccacgccacaacactctgggcagccacaatgaattgcaatactacgtcacatccctggctagagtttggagaaaacgggtcattcagagaagtctgaattggtaaaatcattgccatataaatgaatgaaacaaaagttagctgagctgaatagaaaagtcagttaaaaaagtgttagtttctctcttgacaccccatctctctgattaatgatggaaagtcaaattaaaaatctattttcagagaattcttttccttctacagttgctaattgctcaggaaccattataccaatgtttggtcaccactgaaacatttgaaactggtgtgcctttctctgacttggaaaaattagaaaatgacatagaaaatatgttaaaatttgtggaaaaacacttggaatccagtgatgaagatgaaaaggttggttcaaggagatttcaaaaccatggtggtctcatttttcttctctattaatttcatttttacatcaagatgtttgcccatataatctgtcaaacatgatgaaacagattcaaatgtgattttttgatgtgtgtcaatgtaagagtcacatgattcatgtgcttaaaaagaaaatagactcagtttctgaactagacataatccttagtattatctaatgtttgctaaactctctttgagacattttatcttcaaatataaaatatatttaaaaaaaacataaattttttgatcgttcaggttaacatatcttgacgtatactatactaagtaggttagttttcctccttaggagttgataggaagtgaccttatgcattt

SEQ ID NO: 268 - DNA, 4042 bp, Homo sapiens
cttgctgattgctgacttttgtattctccattgagtgctgcttacttctgtattctccagtgagtcttacttacttttgtattctccaatgagtctgtcttacttctgtactctccaatgagtcttacatacttttgtattctccagcgagtcttacttctgtattttccaatgagaattacttacctctgtgttctccaatgagtcctatgtgaacagctctcacctggttgattatgctgaaatctcttactggggatcccagatatttatttaaactacctttccttctgtataagcatcacactcatgtttgggtttgatttttcccatgagataattttgtgttttcttataattagcgtttagtatctgagctggatgatgccaacctccaggttgaaaatgtccgcgatcaagcccttattttgatgaatgcccgtggaagctcaagcagggagcttgtagaaccaaagttagctgagctgaataggaactttgaaaaggtgtctcaacatatcaaaagtgccaaagtgagtaattatgcttttagagtaaaccatttttcctatgggtatgtatctaaatgatagtcatacagtacatacatcaacaattttgttttattattttaattttattgttttctctctctgtcaccgaggctggagtgcagtggcatgagctcactgcaacctccgccttctgggtgcaagctattctcctgcctcagccacccaagtagctgggatttccggcaactgccaccacacccagctaatttttgtgttttttttaggagagatagggtttcaccatcttggccaggctggtcttgagctgctgacctcaagtgatctgcccgccttggcctcccaaagtgctggaattacaggtgtgagctgctgcacccggccaacaatttttaaattaaaatgtttttaatcactttttctttgaatggagcatttgtccgtatttatttgtgattgtgcatatgaaggagagaaaacaagcaattagtattgaagaaaataacctatttgagaaaaggtttcaaagactcagtcaaaggttagaattggttatgaaatgatgaaactaattcccaagctagggatgaatattaaaccctttattttatggtcacactctatatatgtcttcacattgcacacaccacagaacttgtttttttttttgttttatatgacgacaaatctaaaagttacagataatttcacagtttaatcctaatgtaggaaagtactacctgattttataaatttaataaagagctttagacatttaattaacagggtaataaataggacctttatgagagtgctagttttcccacacttagccaaccccagatggtatttatctgcatttagttttattaaaattgttttattgagttttatttaaacaaatataaaatttttctacgtagatgttatctgaaaagatgacattgagaaatatgcacttctttgacgtttgtgtatgaaaatccaaggggaattctactgaggaaacttaactgggagacattctgtgaggtgtccctgccctgggggctgggtggctgttcttcctttctgtggccatggtaaggatagtttctggatcatggccatagtttcctgctatgctcgcatgtggtctccaaatccacgccacaacactctgggcagccacaatgaattgcaatactacgtcacatccctggctagagtttggagaaaacgggtcattcagagaagtctgaattggtaaaatcattgccatataaatgaatgaaacaaaagttagctgagctgaatagaaaagtcagttaaaaaagtgttagtttctctcttgacaccccatctctctgattaatgatggaaagtcaaattaaaaatctattttcagagaattcttttccttctacagttgctaattgctcaggaaccattataccaatgtttggtcaccactgaaacatttgaaactggtgtgcctttctctgacttggaaaaattagaaaatgacatagaaaatatgttaaaatttgtggaaaaacacttggaatccagtgatgaagatgaaaaggttggttcaaggagatttcaaaaccatggtggtctcatttttcttctctattaatttcatttttacatcaagatgtttgcccatataatctgtcaaacatgatgaaacagattcaaatgtgattttttgatgtgtgtcaatgtaagagtcacatgattcatgtgcttaaaaagaaaatagactcagtttctgaactagacataatccttagtattatctaatgtttgctaaactctctttgagacattttatcttcaaatataaaatatatttaaaaaaaacataaattttttgatcgttcaggttaacatatcttgacgtatactatactaagtaggttagttttcctccttaggagttgataggaagtgaccttatgcatttttcttttgagtcattttttttttccttttaaaaatttagatggatgaggagagtgcccagattgaggaagttctacaaagaggagaagaaatgttacatcaacctatggaagataataaaaaagaaaagatccgtttgcaattattacttttgcatactagatacaacaaaattaaggtattatgattggagagtctctgttgcatttaaataccttacttaactcttgccattcagatgtgtgatgctgcatcacagatgctttaaaacacaccagttggaatatcatctcctcctttctagtgtgtgttactagatgtgttcatatttttggatggtgcagaactcaaaatggaaatgtaaaaccttattattggccatctcttttggatttctgattatgttatcaaacctaaaagagatctatctatttcagaagtggcttcctccaattccatattttatttgtgaaggtcttgtctatgtcaaaaaaaatttctagtttaaaaataactcagtttgtgaaagtgatgtaatatgatttatattctagtaaagattcactaccagctccctttttatttctttatatttttcttttttttttttaaagatggggtatctctatgttgcccaggctgatcttgaactcctaggctcaagtgatcctcctatgtcagtctcccaagttgctaggactacaggtgtgtgggccaccatatccagctccagctcttttttaaacggcaatctttctagctgcattttaagtgtgctgttgttccctggggtccgttctttggtagttccttctagaacgatttttatttgatgactttggaaattaagtagatcgattatggtactgtatttttactgtaccttttctatgtttagatatgtttagatacataaatacttccaactgtgtttcagaattgcctatagtattcagtacaataacgtgctgtaaagttttagcctaggagcaattgactataccacacagcctaagtgtgcaggaggctgtaccatctaggtttgtgtaagggcactctatgatgtttgtatgacaatgaaataacctagagacacatttctcagaacatgtccctgttattaagcaatgcatgactatactttaaaaactagccattctctcaaggctgaagcctcaacatccttcttaactatttcttgttcctcacatatcttctcacatcacactgagtaggcattaaaactgttgagactgcttgaagcaacatacaggtttgaacgtgaagttagatattgctctaccagctgcttgttttatgaccatcagaaagtgccttagcttattttacttcactatcctttccataatttagactaatgattttctcccatgatattatatcccatggacatattcttatgtctgttttttctcactctagcatgtcctttgtctcttcctcacagttattctccccaaagtcatggctgatcatgtcattccttcatcgaagaaactgtttaggaaaatattgcaaaatacagaaaaagctttaaa

SEQ ID NO: 269 - DNA, 4046 bp, Homo sapiens
caaaagtgccaaagtgagtaattatgcttttagagtaaaccatttttcctatgggtatgtatctaaatgatagtcatacagtacatacatcaacaattttgttttattattttaattttattgttttctctctctgtcaccgaggctggagtgcagtggcatgagctcactgcaacctccgccttctgggtgcaagctattctcctgcctcagccacccaagtagctgggatttccggcaactgccaccacacccagctaatttttgtgttttttttaggagagatagggtttcaccatcttggccaggctggtcttgagctgctgacctcaagtgatctgcccgccttggcctcccaaagtgctggaattacaggtgtgagctgctgcacccggccaacaatttttaaattaaaatgtttttaatcactttttctttgaatggagcatttgtccgtatttatttgtgattgtgcatatgaaggagagaaaacaagcaattagtattgaagaaaataacctatttgagaaaaggtttcaaagactcagtcaaaggttagaattggttatgaaatgatgaaactaattcccaagctagggatgaatattaaaccctttattttatggtcacactctatatatgtcttcacattgcacacaccacagaacttgtttttttttttgttttatatgacgacaaatctaaaagttacagataatttcacagtttaatcctaatgtaggaaagtactacctgattttataaatttaataaagagctttagacatttaattaacagggtaataaataggacctttatgagagtgctagttttcccacacttagccaaccccagatggtatttatctgcatttagttttattaaaattgttttattgagttttatttaaacaaatataaaatttttctacgtagatgttatctgaaaagatgacattgagaaatatgcacttctttgacgtttgtgtatgaaaatccaaggggaattctactgaggaaacttaactgggagacattctgtgaggtgtccctgccctgggggctgggtggctgttcttcctttctgtggccatggtaaggatagtttctggatcatggccatagtttcctgctatgctcgcatgtggtctccaaatccacgccacaacactctgggcagccacaatgaattgcaatactacgtcacatccctggctagagtttggagaaaacgggtcattcagagaagtctgaattggtaaaatcattgccatataaatgaatgaaacaaaagttagctgagctgaatagaaaagtcagttaaaaaagtgttagtttctctcttgacaccccatctctctgattaatgatggaaagtcaaattaaaaatctattttcagagaattcttttccttctacagttgctaattgctcaggaaccattataccaatgtttggtcaccactgaaacatttgaaactggtgtgcctttctctgacttggaaaaattagaaaatgacatagaaaatatgttaaaatttgtggaaaaacacttggaatccagtgatgaagatgaaaaggttggttcaaggagatttcaaaaccatggtggtctcatttttcttctctattaatttcatttttacatcaagatgtttgcccatataatctgtcaaacatgatgaaacagattcaaatgtgattttttgatgtgtgtcaatgtaagagtcacatgattcatgtgcttaaaaagaaaatagactcagtttctgaactagacataatccttagtattatctaatgtttgctaaactctctttgagacattttatcttcaaatataaaatatatttaaaaaaaacataaattttttgatcgttcaggttaacatatcttgacgtatactatactaagtaggttagttttcctccttaggagttgataggaagtgaccttatgcatttttcttttgagtcattttttttttccttttaaaaatttagatggatgaggagagtgcccagattgaggaagttctacaaagaggagaagaaatgttacatcaacctatggaagataataaaaaagaaaagatccgtttgcaattattacttttgcatactagatacaacaaaattaaggtattatgattggagagtctctgttgcatttaaataccttacttaactcttgccattcagatgtgtgatgctgcatcacagatgctttaaaacacaccagttggaatatcatctcctcctttctagtgtgtgttactagatgtgttcatatttttggatggtgcagaactcaaaatggaaatgtaaaaccttattattggccatctcttttggatttctgattatgttatcaaacctaaaagagatctatctatttcagaagtggcttcctccaattccatattttatttgtgaaggtcttgtctatgtcaaaaaaaatttctagtttaaaaataactcagtttgtgaaagtgatgtaatatgatttatattctagtaaagattcactaccagctccctttttatttctttatatttttcttttttttttttaaagatggggtatctctatgttgcccaggctgatcttgaactcctaggctcaagtgatcctcctatgtcagtctcccaagttgctaggactacaggtgtgtgggccaccatatccagctccagctcttttttaaacggcaatctttctagctgcattttaagtgtgctgttgttccctggggtccgttctttggtagttccttctagaacgatttttatttgatgactttggaaattaagtagatcgattatggtactgtatttttactgtaccttttctatgtttagatatgtttagatacataaatacttccaactgtgtttcagaattgcctatagtattcagtacaataacgtgctgtaaagttttagcctaggagcaattgactataccacacagcctaagtgtgcaggaggctgtaccatctaggtttgtgtaagggcactctatgatgtttgtatgacaatgaaataacctagagacacatttctcagaacatgtccctgttattaagcaatgcatgactatactttaaaaactagccattctctcaaggctgaagcctcaacatccttcttaactatttcttgttcctcacatatcttctcacatcacactgagtaggcattaaaactgttgagactgcttgaagcaacatacaggtttgaacgtgaagttagatattgctctaccagctgcttgttttatgaccatcagaaagtgccttagcttattttacttcactatcctttccataatttagactaatgattttctcccatgatattatatcccatggacatattcttatgtctgttttttctcactctagcatgtcctttgtctcttcctcacagttattctccccaaagtcatggctgatcatgtcattccttcatcgaagaaactgtttaggaaaatattgcaaaatacagaaaaagctttaaatgcaaggtctgtcaatataacgacatacaaagtcttcagtctgacccctggctccttatgtctttgatgtgctgtcacttcccatgtagtacagctatgctggtttttctttacattttcctaaacacatcatgtgccttagcacatctgggaacttattaattttattccgattccctagagtgagttttgtctttttaggttagctgaaaaatgcgttatcttttaaaactcagctccatttttatttctaacttctgtcagattatattatagttctctgctttattgtgactttttaaagtatctttcttccctaatgcttctccaagttcaggcaatatctttttcatctttgggtccgaaatcagaaattattactggcacaaaatagaaataagttttaagcttttaatacataaataaatttgtttgttaaaagtactaatatatactatacaagctaatttcattctggctttactaacattggtaggcgaactatgttacaaacttcaaatcta

SEQ ID NO: 270 - DNA, 4041 bp, Homo sapiens
atataaaagttagctgggcatgatggtgcatgcttgtaatcccagctactcaggaggctgaggcagaagaatcgcttgaacctgggaggcagacggtgcagtgagccgagatcacagcactgcactccagcctgggaggcagagcaacactctgtcctgcacccccccaaaaaaataaaaatgaaaaagaaagctctgagaagaggatccagaaaatctatattagggcagatgagtagtccatagagcctcaagtctgtctaaatatgacacttcatgatctattttctaatgtaggatattcctgctctataatattattctcagagattaagattacatactgaattacctggatattactttaatcaaaaccctttgtgcatttcatgttgtgttatggaaacatgtttaacttgcttatatttttagcaatgaggtccaattttaaaattgtgatatttttaaaagagtgaaataatgtatcaaaatgttttatttcatacaaaactttgtgattggcaggatattctcattctttcaacaactcaagaaaggaattgttgttttttgtttgctaactgagtttagatggcatagatcttaaagcctgtcaaattaataacatacttatactgtttaatatcatgctgcagatgaaaattaggatacagattgttaaggttttctgttgcaaggtaggtttataatataaaatattaaaactaagttttaaaaatttggttcatgatattgcattccttcacacaatagtcttgttattattcattgtgggggtattttaagagatatatatatatatatatatttttttttttgctgtttttgtaggcaatccctattcaacagaggaaaatgggtcaacttgcttctggaattagatcatcacttcttcctacagattatctggttgaaattaacaaaattttactttgcatggatgatgttgaattatcgcttaatgttccagagctcaacactgctatttacgaagacttctcttttcaggaagactctctgaaggtagacctctgggcactgtgtttgaatggccacagttaatgtagaagtagaggaagaaatttgttcttgtgcctacttagatggtctatatcttttacaatttgtgccaggggattaataatatgtatgactagtaaagctttcctatattgtcaaagaaaatatattaaattttgaatttttaaaaagtgggtatggattgttaaatgtgcacagttataaattatttgcaacatcagagccttgtttaaaattaaacagagacatagaccaccttcctgtcttataaactagattgtcagttgatgttaattgtcagcatttatcaggcaatctataatggtttaaaattggccagttgaggtatggaatggcatcttgattgtaagttaattaaacttaaattctagcaaggcattttcatgtaacttgattgcatttatatgtaaaatcacaataaattcactgataatatggatttgatagtgcattcctctcatttaaactaacattattagatatttgaaaatatcactatttccagcttcaaatgcctcattacctatagagaatgttactgaagcctttcatgtgttctgtacaaatgctactattgtgaggactttttttcctgccttgagtatattatgtagcatattccacacactttggttaaaacagagtatcatttaaaaaaaaaaagttttcagttttcatgattaacaatgattatgtctcattattatttcaaatgagtgttctacaatataaatatctggtcatctgtgattcctttttttgttactttgctggattttgttaatctatgacaatatatttttagaatatcaaagaccaactggacaaacttggagagcagattgcagtcattcatgaaaaacagccagatgtcatccttgaagcctctggacctgaagccattcagatcagagatacacttactcagctgaatgcaaaatgggacagaattaatagaatgtacagtgatcggaaagggtatgtgtaaatgaaattaatatttaatttaaaaaaatgcctgcaagttcatgggcgtgaagaagatcatgtggacactgagattaatgagaacatgtttcatatccttgtaggatgccctattatttttttttcttttaagaaggagtcttgctctgtcacccaggctggggtgcagtggcatgatctcagctcactgcaacatttgcctcccaggttcaagcaattctcctgcctcagcttcccaagtagctgggattacaggcgcacaccaccacgcctggctaatttttgtatttttagtagagatggggtttcaccatgttggccaggctggtattgaactccggacctcaggcagtccgccttgccttggcctcccaaaatgctgggattacaggtgtgagccactgcacccggccttatgccctgtttaataaattgtgatgagtatagttccttaaaggaggaatgtgatcatgtatagatgaccatttataacataatatcttaatgatatggaagcacttctaatttttagtgtctaaatagtgtccattctctttaaaaaaactaaagaaatttttcattaatgttcactttctcagcacacttgatgattaatgtgagtgaagaacagaggcagctacagataattagaatccatatatagtaccaaactcttttttatagccttctgtttaaatgaatgcttttgagccttcttactagattttgaccaggactattaataggtagaaatgaaaacaggcaagatttttgccagtagctgtggatgtgatggaaaggcaaataagttatgaaataacccagtggaaagcgctgtataagaggaaagggagcacagaataatacattgggtaacttgagagacatacgcacaaaaactaggcatcatgttccttctctttttttctattttagcctacatatttcaatgtgactaatccttgaaaagatagcttttagtggcctttggtatattcctttgtttggattttacaaattttctctttgtacctttggagaacattcttttacatacatctttatccatacttatatttcattaggcttgatcattagatgaagacaaatttctttaaaaataatgacattttaaacccctgtattatatcatgaaattggttactatacccctgccaacagtatttgtaaaaatatccttctttttgagcccttactaacattgacaggttttttttttattatttaaaaaaactttgccagtttaatagtgatagattacatctcaattttattttcatttttaaatttttagtgctactaatttttgtacgtcaattttgtatcctgaaactttgctgaatttatttaccagttctaggagctttttggatgagtctttagggttttctaggtatatgatcatgttaccagcaaacagtaacagtttgagttccttttaaccaattcggatgccctttatttctttctcttgtctgattgctctgtctaggacttccggtactatgttgaatgcaagtggtgaaagtgggcatccttttcttgttccagttctcagggggaatgctttcaatttttcctcattcagtataatgttggctatgggctaaaagtcatagatggcttttattacctgaaggtatgttccttctatgccaattttgctgagaattttaatcataaagggatgctagattttgtcagaggctttttctgagtctgttgaggtgatcatgtgatttttgttttaattctgtttatgtggtgtatcacatttattgacttgtgtatgttaaaccatccctgcatccctagtatgaaacccacttgatcatggtttattgtctttttgatatactattggattcagttagctagtattttgttgaggatttttgcatctatatcagggatttggtctgtagttttcttttttgttatgtcctttcc

SEQ ID NO: 271 - DNA, 4076 bp, Homo sapiens
aaaacaatatttgtctttgtaaattaacgctaaacttcaccttaggttggtagtctatattaaattgggaccattttgggtagattgtatatatgttgttaacaaagtaattgagaattatcacacagttcaatttgtttttgtattgagtgcctgtagttaagtatttgcatagttcagcaacctgcagagttatttcttcccttttttggagacaaggtcttgttctgatacccaggctggagtgcaatggtgcaatcgtagctcactgcatccttgagcccctgggctcaagcaatcctctcaccctagtcttctgagtagttggggctgcaagtgtgtgctaccacacccagctgatttttaaattgtttgtaaaaataaggtcttgccatgttgtccaggctggtctcgaactcctaggctcaagtgatcctcctgcctcagtctctcaaagtgctgggattacagccgtgagccaccatgcccagtgggttattccttagtgagcaattgtttcttctgttagaacatgaatttataatttgtttttactcttggggataatatttaaaatgtagattatatttagctaatttgcagatgaaaatattgggtgactcaaatatatcttattgaaatcactttataatgctagttttcttcatagttctgttttgaaagtactaaattagtcatgatcttgaaacattggacgtgaaatttcaactcttttttagaaacaaaggcctataatagtattttgggtgtttccaaagttgtcatttaagttaaatacttttcactatggagggtagattacttgttttagtcttagtaattagtgctgttgctgtatttatttatttttaatcttaaaggagcattctttcttgatggatacttaaaaattatgattttgtagtgattttcatttttttaaacattatacatcaaatattgactgtttattaaatatagaagtattatctaatattttattacatgtattgcacgattatgtgagaacttttgtgattaaaaatgaaaactcctagctgcaaaaacataaattcttattaggaatgatacaatacaatttatttaaaaattgcattcagtttttaaaccagcagttaattatagcagctataaaaataaagataccaccaggcttttaatagctttcaaatccttttaaaaaacacataatcttatttgtcatatgagttctaatcatattcctctcttctgacagatggtttatattcttataaatgttattcttataacactataaagatctaattgaggcagttccttttttatattcatttgactgttttccttgcatcatttaaaatttttgctttgtttttttctatatctctttttgtaacagtgctctattcaaatataatagttattttaataaacaagccaaattcacatgtttcttgtcttccctaatacttgtaagattctcccattcttgataccttgctttgttcttattctttctgttctatgaataaagcagagtaatagttaccacctaatgtgataacatgtcatataatgattcctttcaatattcgtgaaacactcaaagagaattatgctttttccctattattttagataaagacatttttcatgttttaaaaaatttccattatgttgcggagtggtatctaactgtaaaaaaggcttttgtattcaatttctacataactttttatgatgagggaagataatattctttagtttcaatgtttttgaatttaactaaggaaaaaagcttcttggtctattattaagcaatctttatattgtagaatatatacattgtttcacttaaaatatatattaaaataattattagaaattatttattttgggaaatatttagtcaggatattcaaagcaaatatgtaaggttctgcttaattggacagtttttcctcaatatttttaaataatatattcttttaggctaaaaggagaaagtaagcaggtgatgaagtacaggcatcagctagatgagattatctgttggttaacaaaggctgagcatgctatgcaaaagagatcaaccaccgaattgggagaaaacctgcaagaattaagagtaagttgtttatttctgtctatatgccttttggtgcccgaacattatacttcagagtcacatactgcgtgtctcaagaagaaaagggaaaagaaactttgtactttttggtaaatgtggtgaacctgaaagaggaatatcttttattttttaaagagcagttataattttggtcttgcagagcttaaacttcacttatgtaaaaagaacaaactattatggtgtcagtattagaccaaaggtttttaggatattgtaaactgaccttatcattttaaaatacaatagggctatgaaatatcgttttttgtttttagatttggaagaaaattactgattattgtctataaagctgcaaaactcaactttatagataatcagtaattatcagagtgacttgctgaggaacaaaatgcagcttgcaataggtttagtgtcatggttgtattaatcagattttctttgttggtttgcaactaacaagtattgtttatagttgtatatgtatataatctataaaaattcatacatatatagatgtataaatatatccaaatatccataaattttgtattcataaatatttattttttgtgttaagaattaaaatacttgttgcagaacactcagcataatgtgctcacatttttttttaaaaaaagaaattgtgggctgggtgtggtggctcacgcctgtaatcccagcactttgggaggccgaggcgggtggatcacaaggtcatgagatcgagaccatctggctaacatggtgaaaccccatctctataaaaatacaaaaaaaaattagctggccgtggtggcaggcgcatgtagtctcagctactcgggaggctgaagcaggagaatggcatgaacccaggaggcagaggttgcagtgagccgagatcgtgccactgcactccagcctggctgacagagcgagactccgtctcaaaaaaaaaaaaaaaaaagaaattatgagtgtgtattcatacatgtacaagcataagtgtgtgtgaaaggttacttactaattcagagattttgtctataaaggagtatgattgaagcattttgagaaagaaacattgaataatgatgaaaaatattttgtggaacatatattaagttttctttttaaaatgtgacaatatctaacaagcttccttttttacctaaaaatttcagtggtttttttgggaatgtctcttttgtaaacaatttgaggagagttagaaaaggtggaacagtatattaggatggagtagcaaggaggagataagaacagaatgttaaattagcagtgtaaaaataatatatgacccggttaagagacagtgagtaccagagagcccgtttgtgcacaggagtgcaaaaatacacacagaaggcatgtgctcactcccttcctagttatcatttgttagcatgagcttaagcttcttataagtttattttttcacttaacaaattagaaagttacatttgtaataataccaaaaaggtttctaatacagttcttgaattttcccttatctgactaccttctaaccacacctatcttttaacttctccaggacttaactcaagaaatggaagtacatgctgaaaaactcaaatggctgaatagaactgaattggagatgctttcagataaaagtctgagtttacctgaaagggataaaatttcagaaagcttaaggactgtaaatatgacatggaataaggtgtgtgtaaagttactatcacacatttctcatatttattgattttgttgtcagagatgtgggatcatgtaactgctttactttcaagtatgtccaaatggggcaaattttactaaagcttactaatgtttatattttttatctgtcatagacagaggcatatattctagaagaatactttttattttatacagaactctttggcctaggggatttata

SEQ ID NO: 272 - DNA, 4039 bp, Homo sapiens
ctctgccacctacacattgtgactcttctcttctgttggtctctttaaatgtctcagtctataatatactgagttaataattattagctaaataatataacttaatatctgggagggcatattcctctatcaaaaaataatttgactgttttttgtccttttctcttcaatattaattttataaccagaaatttgaattaatgattttgttacattcaagcctgttgggatttttattaggattgtgctgaatttacagattggctatacattttagaaaattatttaagcctcatctaatatatcatacctgaagtaggttacagatagttttaattactaattcaactacttattgtatcaaaaccaatcaatttggcaatgaatattaaatacatacttttttttgtattttctgactcagtaattctacttgggaaatctatgctaagatagagatcagaaatgtgcaaaatactctacatgaaaagatattctttgcaagttttttaaaaaattaaaataaaatttcaggagcaatctaaatatccaagggttaaataaaagtgaatatgggtataggttattacataggtattcataattgtgtttactaagaataaaatatgctcacattataaagttaaatgaaaaaaataaaaaattatgaataagttggctttataattaaaatcatcttgccaaaataaaataatacttccagttctcccacatttgtacttttaatttttctcagtgtcagtgctgattatgttatagaatgttgcaaaactgttttgttggcttgatagctaccaaagacatatggatattacaggtaataccatagccatttcagtatgaaaaaataacctcttagaattttttttacttaaactaaattttatttaaatacacatacacgtgtcaccatgacaccaccataattaaaacatcctgttgattaatttctcttttgctacatttttcatttcagctcatcctaatgtccaaaaggtggtgctagtatcatctgcgtcagatattcctgttcagtctcatcgtacttcggaaatttcaattcctgctgatcttgataaaactataacagaactagccgactggctggtattaatcgaccagatgctgaagtccaacattgtcactgttggggatgtagaagagatcaataagaccgtttcccgaatgaaagtaggtgcatagtgtaaaagcttgtcatggaaacgccacaacccagaggtagaccagatctgtttgaatcccttttgtttatcctaaactatgagagaatgaggtttaaaaaattctgtatctgtcaaacaaccattcagggctaactacaaagcatagagcttttcttgcatttatactgttgtgatatgatcaggtttactgacttaaactaaagacccagtgcatttttaaaatctaaaactgataccgtaaagctaggcacattagtataaatataagctggcgttagcatttcatgcctgttgtgtgatgtaggataatctcctaaagtgcctttgcaacttatatttcataatgagattaatttctgattttaaaagtgaatatctcctataactttactactatacatgtaccatctaatattcatttgtaaaaattctttttccctatttagtgtgtgctaagttctgggctgtgagtggtacaaggatactgacaagaatattctaggtagaaattgggaaactacaatgaaataataataacagctcttgctaaattttattaagtgcttcatgtgtgctggtcatttttctaagtattgtacacgttatctcattcaattctttaatagtcttgtgagataggtactgtttttatccccacattacaaataagtccacaccgaggcagaggcactgagtgcatatgagttgacaaattactgtagcaaggcaagagtctaataaaagcctcaggagaagtacaggcaacctgttgggggagccaggatgaggaaggggatcacttctccagtgatggaaagcaaactgtgtgggattttggcatctgggacaaagtggtgacattcctggtatagggaacagagtgaataaagtcatgtggtacaggaggcacaaaggacagtagggccaacatttgtgcaattaagaaatacagtgtgaaacaaggcaggaaaagcagctcaaattccctttgtgaaggagcctgcaggctgtgcaaagccctttggatttttagtctgtaagcaattggtaaacatcttccttcccatttctttttctttttaaaattgtgtttatgaactcatgataaccgtgctctgctttagtagaagactaggatggattggaggcaagaaatgcataaatcaaggcaaagagccctttctgaaatgactaagatgatgctgttgcaattagcagaaataaggaatagaagaaattgagtgtgaatgagggtttgagtgatttagtttcagacgtgttgtggtggggagtccttatgccatttagaaggaagtgatcagtattcattaccatgtgccctgggatttaggattgaaagttgtgagcaatccatttagaagtaatatttgacaccaaaggagtagctggaatctacaaaacgggtgaatttgtaaagaggaaggactgggaaaaagtcatttgccactatttgtattttttgtaaattgctttctagtctctatgactgtcattagttctgtactgaaaacacatgattttcctgatgttgttaccatttctcccatatttattagcactgagagacaaaccatctacagcagcagtttttcgtgtctaagaggatttaatttatagttattcctcttagcacttttctgtgtcacccccaaccctatgacattagtttgtgttcgtacctgacacagaacagatatgcaagtcatcatcagcagcaataactgctaatgttttcagggcatttttcagcttttgaagggattttctttgtttaatgtcctcagactggatgtaattgagctgtcagtattttattatttcttttttgtgaaaacaaaaacacagagaggtaaagctccttgcctggtgactcaggtgctaaatggaagaactgagatttgaatgcaggatccttgactttaaatcatgcactcattttctgccacgttgctgatgcttcactatgccatagaggaggaaaacaacgacaactttgatgtcagcacaactgttttgcttattattcttctcatatggcttattaacctatccgaataatcatttctacttaacagattacaaaggctgacttagaacagcgccatcctcagctggattatgtttttacattggcacagaatttgaaaaataaagcttccagttcagatatgagaacagcaattacagaaaaatgtaagttttttaaaaaaagttatgtattatcatccactttccctgcaaatggtgacacacacacacacacacacacacacacacacaaacacattttcaaagattattcaactagaaagtaatagtgtttaatatttgttactctttatttatacagaaatgtagctttcccttgtttttatgttttgtgaacattgttacaataaccttatgaagtccttaattattaacatcacgactcttaagtaattacttacacattgggttttcttctcttaacttaggctttcttttagaggaataaaaaaaggttaaaggaactcacaagaatgcaaatcctttctctcattatactttattctctaaaatcaggtcttactgtgtcttttaactcaacccaaaattcagtccacaaatatttattgagcaactactatgtgcttatgtgactggcattaatttggggatactttagttataaatgagagaaaacaacaacaaaaaataaacatacaaaacaatagcaaacaaagatccttgcttggggtttgcattctagctcagaagcatctaggttctacaaacccttcttagtggga

SEQ ID NO: 273 - DNA, 4041 bp, Homo sapiens
attactaattcaactacttattgtatcaaaaccaatcaatttggcaatgaatattaaatacatacttttttttgtattttctgactcagtaattctacttgggaaatctatgctaagatagagatcagaaatgtgcaaaatactctacatgaaaagatattctttgcaagttttttaaaaaattaaaataaaatttcaggagcaatctaaatatccaagggttaaataaaagtgaatatgggtataggttattacataggtattcataattgtgtttactaagaataaaatatgctcacattataaagttaaatgaaaaaaataaaaaattatgaataagttggctttataattaaaatcatcttgccaaaataaaataatacttccagttctcccacatttgtacttttaatttttctcagtgtcagtgctgattatgttatagaatgttgcaaaactgttttgttggcttgatagctaccaaagacatatggatattacaggtaataccatagccatttcagtatgaaaaaataacctcttagaattttttttacttaaactaaattttatttaaatacacatacacgtgtcaccatgacaccaccataattaaaacatcctgttgattaatttctcttttgctacatttttcatttcagctcatcctaatgtccaaaaggtggtgctagtatcatctgcgtcagatattcctgttcagtctcatcgtacttcggaaatttcaattcctgctgatcttgataaaactataacagaactagccgactggctggtattaatcgaccagatgctgaagtccaacattgtcactgttggggatgtagaagagatcaataagaccgtttcccgaatgaaagtaggtgcatagtgtaaaagcttgtcatggaaacgccacaacccagaggtagaccagatctgtttgaatcccttttgtttatcctaaactatgagagaatgaggtttaaaaaattctgtatctgtcaaacaaccattcagggctaactacaaagcatagagcttttcttgcatttatactgttgtgatatgatcaggtttactgacttaaactaaagacccagtgcatttttaaaatctaaaactgataccgtaaagctaggcacattagtataaatataagctggcgttagcatttcatgcctgttgtgtgatgtaggataatctcctaaagtgcctttgcaacttatatttcataatgagattaatttctgattttaaaagtgaatatctcctataactttactactatacatgtaccatctaatattcatttgtaaaaattctttttccctatttagtgtgtgctaagttctgggctgtgagtggtacaaggatactgacaagaatattctaggtagaaattgggaaactacaatgaaataataataacagctcttgctaaattttattaagtgcttcatgtgtgctggtcatttttctaagtattgtacacgttatctcattcaattctttaatagtcttgtgagataggtactgtttttatccccacattacaaataagtccacaccgaggcagaggcactgagtgcatatgagttgacaaattactgtagcaaggcaagagtctaataaaagcctcaggagaagtacaggcaacctgttgggggagccaggatgaggaaggggatcacttctccagtgatggaaagcaaactgtgtgggattttggcatctgggacaaagtggtgacattcctggtatagggaacagagtgaataaagtcatgtggtacaggaggcacaaaggacagtagggccaacatttgtgcaattaagaaatacagtgtgaaacaaggcaggaaaagcagctcaaattccctttgtgaaggagcctgcaggctgtgcaaagccctttggatttttagtctgtaagcaattggtaaacatcttccttcccatttctttttctttttaaaattgtgtttatgaactcatgataaccgtgctctgctttagtagaagactaggatggattggaggcaagaaatgcataaatcaaggcaaagagccctttctgaaatgactaagatgatgctgttgcaattagcagaaataaggaatagaagaaattgagtgtgaatgagggtttgagtgatttagtttcagacgtgttgtggtggggagtccttatgccatttagaaggaagtgatcagtattcattaccatgtgccctgggatttaggattgaaagttgtgagcaatccatttagaagtaatatttgacaccaaaggagtagctggaatctacaaaacgggtgaatttgtaaagaggaaggactgggaaaaagtcatttgccactatttgtattttttgtaaattgctttctagtctctatgactgtcattagttctgtactgaaaacacatgattttcctgatgttgttaccatttctcccatatttattagcactgagagacaaaccatctacagcagcagtttttcgtgtctaagaggatttaatttatagttattcctcttagcacttttctgtgtcacccccaaccctatgacattagtttgtgttcgtacctgacacagaacagatatgcaagtcatcatcagcagcaataactgctaatgttttcagggcatttttcagcttttgaagggattttctttgtttaatgtcctcagactggatgtaattgagctgtcagtattttattatttcttttttgtgaaaacaaaaacacagagaggtaaagctccttgcctggtgactcaggtgctaaatggaagaactgagatttgaatgcaggatccttgactttaaatcatgcactcattttctgccacgttgctgatgcttcactatgccatagaggaggaaaacaacgacaactttgatgtcagcacaactgttttgcttattattcttctcatatggcttattaacctatccgaataatcatttctacttaacagattacaaaggctgacttagaacagcgccatcctcagctggattatgtttttacattggcacagaatttgaaaaataaagcttccagttcagatatgagaacagcaattacagaaaaatgtaagttttttaaaaaaagttatgtattatcatccactttccctgcaaatggtgacacacacacacacacacacacacacacacacaaacacattttcaaagattattcaactagaaagtaatagtgtttaatatttgttactctttatttatacagaaatgtagctttcccttgtttttatgttttgtgaacattgttacaataaccttatgaagtccttaattattaacatcacgactcttaagtaattacttacacattgggttttcttctcttaacttaggctttcttttagaggaataaaaaaaggttaaaggaactcacaagaatgcaaatcctttctctcattatactttattctctaaaatcaggtcttactgtgtcttttaactcaacccaaaattcagtccacaaatatttattgagcaactactatgtgcttatgtgactggcattaatttggggatactttagttataaatgagagaaaacaacaacaaaaaataaacatacaaaacaatagcaaacaaagatccttgcttggggtttgcattctagctcagaagcatctaggttctacaaacccttcttagtgggaatgtactaccaatagcaaacgaagtctaaattctcaagagtgacacctagggattgtcacaatctgctgccactaccccttttctcacttcagccctcagcccggcctgtaattatgctgttattccttaaaatatcctgacatttcctagtcttcttacctttatttgcattattttatttctcttggccttttcttcccaggtgcaattctacgcagcagctaaaatgtcatcccctttgtgacatctttccctcctcttctggtccctggtgaatgttaatttctatttttagttccttctatggcctttccccccattgctttattatagatc

SEQ ID NO: 274 - DNA, 4042 bp, Homo sapiens
cattcagggctaactacaaagcatagagcttttcttgcatttatactgttgtgatatgatcaggtttactgacttaaactaaagacccagtgcatttttaaaatctaaaactgataccgtaaagctaggcacattagtataaatataagctggcgttagcatttcatgcctgttgtgtgatgtaggataatctcctaaagtgcctttgcaacttatatttcataatgagattaatttctgattttaaaagtgaatatctcctataactttactactatacatgtaccatctaatattcatttgtaaaaattctttttccctatttagtgtgtgctaagttctgggctgtgagtggtacaaggatactgacaagaatattctaggtagaaattgggaaactacaatgaaataataataacagctcttgctaaattttattaagtgcttcatgtgtgctggtcatttttctaagtattgtacacgttatctcattcaattctttaatagtcttgtgagataggtactgtttttatccccacattacaaataagtccacaccgaggcagaggcactgagtgcatatgagttgacaaattactgtagcaaggcaagagtctaataaaagcctcaggagaagtacaggcaacctgttgggggagccaggatgaggaaggggatcacttctccagtgatggaaagcaaactgtgtgggattttggcatctgggacaaagtggtgacattcctggtatagggaacagagtgaataaagtcatgtggtacaggaggcacaaaggacagtagggccaacatttgtgcaattaagaaatacagtgtgaaacaaggcaggaaaagcagctcaaattccctttgtgaaggagcctgcaggctgtgcaaagccctttggatttttagtctgtaagcaattggtaaacatcttccttcccatttctttttctttttaaaattgtgtttatgaactcatgataaccgtgctctgctttagtagaagactaggatggattggaggcaagaaatgcataaatcaaggcaaagagccctttctgaaatgactaagatgatgctgttgcaattagcagaaataaggaatagaagaaattgagtgtgaatgagggtttgagtgatttagtttcagacgtgttgtggtggggagtccttatgccatttagaaggaagtgatcagtattcattaccatgtgccctgggatttaggattgaaagttgtgagcaatccatttagaagtaatatttgacaccaaaggagtagctggaatctacaaaacgggtgaatttgtaaagaggaaggactgggaaaaagtcatttgccactatttgtattttttgtaaattgctttctagtctctatgactgtcattagttctgtactgaaaacacatgattttcctgatgttgttaccatttctcccatatttattagcactgagagacaaaccatctacagcagcagtttttcgtgtctaagaggatttaatttatagttattcctcttagcacttttctgtgtcacccccaaccctatgacattagtttgtgttcgtacctgacacagaacagatatgcaagtcatcatcagcagcaataactgctaatgttttcagggcatttttcagcttttgaagggattttctttgtttaatgtcctcagactggatgtaattgagctgtcagtattttattatttcttttttgtgaaaacaaaaacacagagaggtaaagctccttgcctggtgactcaggtgctaaatggaagaactgagatttgaatgcaggatccttgactttaaatcatgcactcattttctgccacgttgctgatgcttcactatgccatagaggaggaaaacaacgacaactttgatgtcagcacaactgttttgcttattattcttctcatatggcttattaacctatccgaataatcatttctacttaacagattacaaaggctgacttagaacagcgccatcctcagctggattatgtttttacattggcacagaatttgaaaaataaagcttccagttcagatatgagaacagcaattacagaaaaatgtaagttttttaaaaaaagttatgtattatcatccactttccctgcaaatggtgacacacacacacacacacacacacacacacacaaacacattttcaaagattattcaactagaaagtaatagtgtttaatatttgttactctttatttatacagaaatgtagctttcccttgtttttatgttttgtgaacattgttacaataaccttatgaagtccttaattattaacatcacgactcttaagtaattacttacacattgggttttcttctcttaacttaggctttcttttagaggaataaaaaaaggttaaaggaactcacaagaatgcaaatcctttctctcattatactttattctctaaaatcaggtcttactgtgtcttttaactcaacccaaaattcagtccacaaatatttattgagcaactactatgtgcttatgtgactggcattaatttggggatactttagttataaatgagagaaaacaacaacaaaaaataaacatacaaaacaatagcaaacaaagatccttgcttggggtttgcattctagctcagaagcatctaggttctacaaacccttcttagtgggaatgtactaccaatagcaaacgaagtctaaattctcaagagtgacacctagggattgtcacaatctgctgccactaccccttttctcacttcagccctcagcccggcctgtaattatgctgttattccttaaaatatcctgacatttcctagtcttcttacctttatttgcattattttatttctcttggccttttcttcccaggtgcaattctacgcagcagctaaaatgtcatcccctttgtgacatctttccctcctcttctggtccctggtgaatgttaatttctatttttagttccttctatggcctttccccccattgctttattatagatcttacaactactttaattgtctctctcttccatagattgtgaatatccgtctttctgcccttgggcctttaacagtgccaatacaaattaactacctaataaatatttgtgacaaaatataaactggaaggataaatcctaatatttgtcaagggaagaaagtcagctactctccctgtaaaaagtatgttttgatttcaaaatagtcatggtagcaacagggttattataggagatacattagaaaagaacttttaatgtctaacagtgttggcttatttttactaaatacatcattttccttcttttctctttttatgaatggatggattgtgcctattatggaactttggagtgagctggtttccctcacatcacaggggagctcctctgctctagtgataccaaactattgacaagccatttccagtttgctttttctatcatcttgatgttttcttttaattattattttttccatcacctctctttttgtccaaaacttctttcaggtgtttgtttttttgttttacaagacttctcctaaatatcttccctttcccattgaatgtacacactctattttctctctatatataaatatttctgtgtgtgtagaggttctataaccttcatcactcctcattatatgaaaaacccttcccagggggaatgtattgctaccaatagtaacctcgttttagggcttaactcacaatgaatgggataatttgcctatttcttatgataaacctgtgatatttactctcgcttgatgtctttggtttcatttgtttactgttaaaggattctattagtaatagaattggtcataagtactttatgtaactttttaactgacaagagaacattatgatagatttggcctctcttccttaagtttaaaacttaagcaatttatttaaacagctaagacagaatgaaacagattgtctcattgagcaagttttaaagaatgatgacatgtaagtataacttaaggcctgaacag

SEQ ID NO: 275 - DNA, 4070 bp, Homo sapiens
gtacacgttatctcattcaattctttaatagtcttgtgagataggtactgtttttatccccacattacaaataagtccacaccgaggcagaggcactgagtgcatatgagttgacaaattactgtagcaaggcaagagtctaataaaagcctcaggagaagtacaggcaacctgttgggggagccaggatgaggaaggggatcacttctccagtgatggaaagcaaactgtgtgggattttggcatctgggacaaagtggtgacattcctggtatagggaacagagtgaataaagtcatgtggtacaggaggcacaaaggacagtagggccaacatttgtgcaattaagaaatacagtgtgaaacaaggcaggaaaagcagctcaaattccctttgtgaaggagcctgcaggctgtgcaaagccctttggatttttagtctgtaagcaattggtaaacatcttccttcccatttctttttctttttaaaattgtgtttatgaactcatgataaccgtgctctgctttagtagaagactaggatggattggaggcaagaaatgcataaatcaaggcaaagagccctttctgaaatgactaagatgatgctgttgcaattagcagaaataaggaatagaagaaattgagtgtgaatgagggtttgagtgatttagtttcagacgtgttgtggtggggagtccttatgccatttagaaggaagtgatcagtattcattaccatgtgccctgggatttaggattgaaagttgtgagcaatccatttagaagtaatatttgacaccaaaggagtagctggaatctacaaaacgggtgaatttgtaaagaggaaggactgggaaaaagtcatttgccactatttgtattttttgtaaattgctttctagtctctatgactgtcattagttctgtactgaaaacacatgattttcctgatgttgttaccatttctcccatatttattagcactgagagacaaaccatctacagcagcagtttttcgtgtctaagaggatttaatttatagttattcctcttagcacttttctgtgtcacccccaaccctatgacattagtttgtgttcgtacctgacacagaacagatatgcaagtcatcatcagcagcaataactgctaatgttttcagggcatttttcagcttttgaagggattttctttgtttaatgtcctcagactggatgtaattgagctgtcagtattttattatttcttttttgtgaaaacaaaaacacagagaggtaaagctccttgcctggtgactcaggtgctaaatggaagaactgagatttgaatgcaggatccttgactttaaatcatgcactcattttctgccacgttgctgatgcttcactatgccatagaggaggaaaacaacgacaactttgatgtcagcacaactgttttgcttattattcttctcatatggcttattaacctatccgaataatcatttctacttaacagattacaaaggctgacttagaacagcgccatcctcagctggattatgtttttacattggcacagaatttgaaaaataaagcttccagttcagatatgagaacagcaattacagaaaaatgtaagttttttaaaaaaagttatgtattatcatccactttccctgcaaatggtgacacacacacacacacacacacacacacacacaaacacattttcaaagattattcaactagaaagtaatagtgtttaatatttgttactctttatttatacagaaatgtagctttcccttgtttttatgttttgtgaacattgttacaataaccttatgaagtccttaattattaacatcacgactcttaagtaattacttacacattgggttttcttctcttaacttaggctttcttttagaggaataaaaaaaggttaaaggaactcacaagaatgcaaatcctttctctcattatactttattctctaaaatcaggtcttactgtgtcttttaactcaacccaaaattcagtccacaaatatttattgagcaactactatgtgcttatgtgactggcattaatttggggatactttagttataaatgagagaaaacaacaacaaaaaataaacatacaaaacaatagcaaacaaagatccttgcttggggtttgcattctagctcagaagcatctaggttctacaaacccttcttagtgggaatgtactaccaatagcaaacgaagtctaaattctcaagagtgacacctagggattgtcacaatctgctgccactaccccttttctcacttcagccctcagcccggcctgtaattatgctgttattccttaaaatatcctgacatttcctagtcttcttacctttatttgcattattttatttctcttggccttttcttcccaggtgcaattctacgcagcagctaaaatgtcatcccctttgtgacatctttccctcctcttctggtccctggtgaatgttaatttctatttttagttccttctatggcctttccccccattgctttattatagatcttacaactactttaattgtctctctcttccatagattgtgaatatccgtctttctgcccttgggcctttaacagtgccaatacaaattaactacctaataaatatttgtgacaaaatataaactggaaggataaatcctaatatttgtcaagggaagaaagtcagctactctccctgtaaaaagtatgttttgatttcaaaatagtcatggtagcaacagggttattataggagatacattagaaaagaacttttaatgtctaacagtgttggcttatttttactaaatacatcattttccttcttttctctttttatgaatggatggattgtgcctattatggaactttggagtgagctggtttccctcacatcacaggggagctcctctgctctagtgataccaaactattgacaagccatttccagtttgctttttctatcatcttgatgttttcttttaattattattttttccatcacctctctttttgtccaaaacttctttcaggtgtttgtttttttgttttacaagacttctcctaaatatcttccctttcccattgaatgtacacactctattttctctctatatataaatatttctgtgtgtgtagaggttctataaccttcatcactcctcattatatgaaaaacccttcccagggggaatgtattgctaccaatagtaacctcgttttagggcttaactcacaatgaatgggataatttgcctatttcttatgataaacctgtgatatttactctcgcttgatgtctttggtttcatttgtttactgttaaaggattctattagtaatagaattggtcataagtactttatgtaactttttaactgacaagagaacattatgatagatttggcctctcttccttaagtttaaaacttaagcaatttatttaaacagctaagacagaatgaaacagattgtctcattgagcaagttttaaagaatgatgacatgtaagtataacttaaggcctgaacagccttgttgatagcttttttgttttttgagatggagtttcactcttgttgcccaggctggatgcaatggtgcaatcttgactcactgcaacctctgcctcctgggatccagcgattctcctgcctcagcctcccaagtagctgggattacaggcacctgccaccatgcccagctaatttttatatttttagtagagacagggtttcaccatgttggccaggctggtcttgaacttctggcttcaggtgatccacctgcctcggcctcccaaagtgctgggattacaggtgtcagccactgcacccagccagttgatagcttttatgtttcactataaccatatattatcccaagaactttgccaaagtgttccatgataactcagctggaatgttatcttgtagttacgttcctcttgggcctggtacttaactatagcctttctttttgtctgatatccaaagcatctttcagcagcgtggttttaacattctacctacttatt

SEQ ID NO: 276 - DNA, 4037 bp, Homo sapiens
gaggatttaatttatagttattcctcttagcacttttctgtgtcacccccaaccctatgacattagtttgtgttcgtacctgacacagaacagatatgcaagtcatcatcagcagcaataactgctaatgttttcagggcatttttcagcttttgaagggattttctttgtttaatgtcctcagactggatgtaattgagctgtcagtattttattatttcttttttgtgaaaacaaaaacacagagaggtaaagctccttgcctggtgactcaggtgctaaatggaagaactgagatttgaatgcaggatccttgactttaaatcatgcactcattttctgccacgttgctgatgcttcactatgccatagaggaggaaaacaacgacaactttgatgtcagcacaactgttttgcttattattcttctcatatggcttattaacctatccgaataatcatttctacttaacagattacaaaggctgacttagaacagcgccatcctcagctggattatgtttttacattggcacagaatttgaaaaataaagcttccagttcagatatgagaacagcaattacagaaaaatgtaagttttttaaaaaaagttatgtattatcatccactttccctgcaaatggtgacacacacacacacacacacacacacacacacaaacacattttcaaagattattcaactagaaagtaatagtgtttaatatttgttactctttatttatacagaaatgtagctttcccttgtttttatgttttgtgaacattgttacaataaccttatgaagtccttaattattaacatcacgactcttaagtaattacttacacattgggttttcttctcttaacttaggctttcttttagaggaataaaaaaaggttaaaggaactcacaagaatgcaaatcctttctctcattatactttattctctaaaatcaggtcttactgtgtcttttaactcaacccaaaattcagtccacaaatatttattgagcaactactatgtgcttatgtgactggcattaatttggggatactttagttataaatgagagaaaacaacaacaaaaaataaacatacaaaacaatagcaaacaaagatccttgcttggggtttgcattctagctcagaagcatctaggttctacaaacccttcttagtgggaatgtactaccaatagcaaacgaagtctaaattctcaagagtgacacctagggattgtcacaatctgctgccactaccccttttctcacttcagccctcagcccggcctgtaattatgctgttattccttaaaatatcctgacatttcctagtcttcttacctttatttgcattattttatttctcttggccttttcttcccaggtgcaattctacgcagcagctaaaatgtcatcccctttgtgacatctttccctcctcttctggtccctggtgaatgttaatttctatttttagttccttctatggcctttccccccattgctttattatagatcttacaactactttaattgtctctctcttccatagattgtgaatatccgtctttctgcccttgggcctttaacagtgccaatacaaattaactacctaataaatatttgtgacaaaatataaactggaaggataaatcctaatatttgtcaagggaagaaagtcagctactctccctgtaaaaagtatgttttgatttcaaaatagtcatggtagcaacagggttattataggagatacattagaaaagaacttttaatgtctaacagtgttggcttatttttactaaatacatcattttccttcttttctctttttatgaatggatggattgtgcctattatggaactttggagtgagctggtttccctcacatcacaggggagctcctctgctctagtgataccaaactattgacaagccatttccagtttgctttttctatcatcttgatgttttcttttaattattattttttccatcacctctctttttgtccaaaacttctttcaggtgtttgtttttttgttttacaagacttctcctaaatatcttccctttcccattgaatgtacacactctattttctctctatatataaatatttctgtgtgtgtagaggttctataaccttcatcactcctcattatatgaaaaacccttcccagggggaatgtattgctaccaatagtaacctcgttttagggcttaactcacaatgaatgggataatttgcctatttcttatgataaacctgtgatatttactctcgcttgatgtctttggtttcatttgtttactgttaaaggattctattagtaatagaattggtcataagtactttatgtaactttttaactgacaagagaacattatgatagatttggcctctcttccttaagtttaaaacttaagcaatttatttaaacagctaagacagaatgaaacagattgtctcattgagcaagttttaaagaatgatgacatgtaagtataacttaaggcctgaacagccttgttgatagcttttttgttttttgagatggagtttcactcttgttgcccaggctggatgcaatggtgcaatcttgactcactgcaacctctgcctcctgggatccagcgattctcctgcctcagcctcccaagtagctgggattacaggcacctgccaccatgcccagctaatttttatatttttagtagagacagggtttcaccatgttggccaggctggtcttgaacttctggcttcaggtgatccacctgcctcggcctcccaaagtgctgggattacaggtgtcagccactgcacccagccagttgatagcttttatgtttcactataaccatatattatcccaagaactttgccaaagtgttccatgataactcagctggaatgttatcttgtagttacgttcctcttgggcctggtacttaactatagcctttctttttgtctgatatccaaagcatctttcagcagcgtggttttaacattctacctacttattatcagcaggttcttgcggatattctaagttattgtttattagtacctcagttcaagattatgaactaactctgaagtgattaataaaaaatttaagtttccagccgggtgcgttggctcatgcctgtaatcccaacactttgggaggccgaggcagacagatcacgaggtcaggagttcgagacctggccaacatggggaaaccctctctctactaaaaatacaaaagtagccgggtgtggtggcacacacctatagtcccagctacatgggaggctgaggcaggagaatcacttgtacctgggggcggaggttgcagcgagctgaaagccaggatcgtgccactgcactccagcctgggcgacagagcaagactctctctcaaaaaaaaaaaaaaaaaaagtttccttagatctgtctgtccttaaaaccttgttaaaaatagagaaaggagaagagagaaagcttgaggagaaatagaaagagagagaaggtgataatgagtgaaaggaatgaacaataataaaagaggaaggacaagagccagtatggaatttttatgatgaagagctgctgggtgcacagttcatgagtctcttttacttttagcatttctcttgaacttgaatatataaaattccttttagagagttttcctgctacagtaaaacaaatgcaaaaaaaaattcttacacagttcagtttcttctaaaatcaagactgccttagaaaattctcctttgagggtaacaggtgactatctctctgtcttaaagttctgtcatgaagtactgttaaaccctaccttcatcaaaccaggtctataaatacaactgtaaatacaaaattaaatagaacagtattttctttataattgtttggcagtatcagtttataatagtagatatttttttgggagttgttttagagcactgaaaataagagttcaagatttttttttctcaaacaccgtttcagaaatatatcaattgta

SEQ ID NO: 277 - DNA, 4046 bp, Homo sapiens
attgctttattatagatcttacaactactttaattgtctctctcttccatagattgtgaatatccgtctttctgcccttgggcctttaacagtgccaatacaaattaactacctaataaatatttgtgacaaaatataaactggaaggataaatcctaatatttgtcaagggaagaaagtcagctactctccctgtaaaaagtatgttttgatttcaaaatagtcatggtagcaacagggttattataggagatacattagaaaagaacttttaatgtctaacagtgttggcttatttttactaaatacatcattttccttcttttctctttttatgaatggatggattgtgcctattatggaactttggagtgagctggtttccctcacatcacaggggagctcctctgctctagtgataccaaactattgacaagccatttccagtttgctttttctatcatcttgatgttttcttttaattattattttttccatcacctctctttttgtccaaaacttctttcaggtgtttgtttttttgttttacaagacttctcctaaatatcttccctttcccattgaatgtacacactctattttctctctatatataaatatttctgtgtgtgtagaggttctataaccttcatcactcctcattatatgaaaaacccttcccagggggaatgtattgctaccaatagtaacctcgttttagggcttaactcacaatgaatgggataatttgcctatttcttatgataaacctgtgatatttactctcgcttgatgtctttggtttcatttgtttactgttaaaggattctattagtaatagaattggtcataagtactttatgtaactttttaactgacaagagaacattatgatagatttggcctctcttccttaagtttaaaacttaagcaatttatttaaacagctaagacagaatgaaacagattgtctcattgagcaagttttaaagaatgatgacatgtaagtataacttaaggcctgaacagccttgttgatagcttttttgttttttgagatggagtttcactcttgttgcccaggctggatgcaatggtgcaatcttgactcactgcaacctctgcctcctgggatccagcgattctcctgcctcagcctcccaagtagctgggattacaggcacctgccaccatgcccagctaatttttatatttttagtagagacagggtttcaccatgttggccaggctggtcttgaacttctggcttcaggtgatccacctgcctcggcctcccaaagtgctgggattacaggtgtcagccactgcacccagccagttgatagcttttatgtttcactataaccatatattatcccaagaactttgccaaagtgttccatgataactcagctggaatgttatcttgtagttacgttcctcttgggcctggtacttaactatagcctttctttttgtctgatatccaaagcatctttcagcagcgtggttttaacattctacctacttattatcagcaggttcttgcggatattctaagttattgtttattagtacctcagttcaagattatgaactaactctgaagtgattaataaaaaatttaagtttccagccgggtgcgttggctcatgcctgtaatcccaacactttgggaggccgaggcagacagatcacgaggtcaggagttcgagacctggccaacatggggaaaccctctctctactaaaaatacaaaagtagccgggtgtggtggcacacacctatagtcccagctacatgggaggctgaggcaggagaatcacttgtacctgggggcggaggttgcagcgagctgaaagccaggatcgtgccactgcactccagcctgggcgacagagcaagactctctctcaaaaaaaaaaaaaaaaaaagtttccttagatctgtctgtccttaaaaccttgttaaaaatagagaaaggagaagagagaaagcttgaggagaaatagaaagagagagaaggtgataatgagtgaaaggaatgaacaataataaaagaggaaggacaagagccagtatggaatttttatgatgaagagctgctgggtgcacagttcatgagtctcttttacttttagcatttctcttgaacttgaatatataaaattccttttagagagttttcctgctacagtaaaacaaatgcaaaaaaaaattcttacacagttcagtttcttctaaaatcaagactgccttagaaaattctcctttgagggtaacaggtgactatctctctgtcttaaagttctgtcatgaagtactgttaaaccctaccttcatcaaaccaggtctataaatacaactgtaaatacaaaattaaatagaacagtattttctttataattgtttggcagtatcagtttataatagtagatatttttttgggagttgttttagagcactgaaaataagagttcaagatttttttttctcaaacaccgtttcagaaatatatcaattgtataggatggcagatgtatattaaaattccttcaaaatgtgtttatcagcttgccttcttctgtttatagacttatttgtgatacatttgatatatgatattttttctttctcctgagggttacatgttgggatttttttttcttttataatgctaccctcagtggaaagggtcaagaaccagtgggatggcacccagcatggcgttgagctaagacagcagcagcttgaggacatgattattgacagtcttcagtgggatgaccatagggaggagactgaagaactgatgagaaaatatgaggctcgactctatattcttcagcaagcccgacgggatccactcaccaaacaaatttctgataaccaagtaagactcatcagatattttttggcagtattgttttgttggatatactttttttctattgttcactgtaattcttaacaataggaccctgccatgttttttcctaagttcttagagtgtctaatgaaatttatatgaagaatttgatctggaagatttttttcgaaaaatttctggaggcataacaagtaagaatatgcatgtctccgagatttatagctcactgactttttgcaagtgaaacacaccctcaaatcagcatctagaaagagaacactttcaagattccaggaaccctcttttgctcccttctgtactgtattagtctgttctcacattgctataaataactacctgagactgagtaatttatgaagaaaggagatttaattgactcacagttcatttgagggctactgtagtgaagcatgactgggaggtaccaggaaacttaaaatcatggtggaaggcaaaggggaagcaggcaccttctttacaaggcagcaagacagagagagatagaagggagaagtgccacacattttatttatttattggagacattgtctcactctgccgcccaggctggaatgcagtggcactatctcagctcattgcaacagccacctcttgggttccagcgattcttgcctcagccttccaagtagctgggatgacaggcgtgcaccaccatgcccagctaatttttgtattttctgtagagacggggttccgccatgttgcccaggcttgtctgcaattcctgagctcaagtaatctgctcactttggcctcccaagtgtcacacactgttaaaccatctgatcttgtgagaactcactatcacaagaacagcacaggggaaattcatccccatgatccagtcacctcccaccaggctcctccttcgattggacatgagatttgggtggggacacaaatccaaaccatattacttacttaccctgaaggttatttttattaataagtttttccaagactttcatttgaggactactatagtgaacaaatcagataagtaagtttagtttcctttaatgactttttaaccaaactgttttatcaatttcgtaatagcagacatcttttttgtcatcagttcagttatagagttgataatattgaacaacta

SEQ ID NO: 278 - DNA, 4043 bp, Homo sapiens
ttatgataaacctgtgatatttactctcgcttgatgtctttggtttcatttgtttactgttaaaggattctattagtaatagaattggtcataagtactttatgtaactttttaactgacaagagaacattatgatagatttggcctctcttccttaagtttaaaacttaagcaatttatttaaacagctaagacagaatgaaacagattgtctcattgagcaagttttaaagaatgatgacatgtaagtataacttaaggcctgaacagccttgttgatagcttttttgttttttgagatggagtttcactcttgttgcccaggctggatgcaatggtgcaatcttgactcactgcaacctctgcctcctgggatccagcgattctcctgcctcagcctcccaagtagctgggattacaggcacctgccaccatgcccagctaatttttatatttttagtagagacagggtttcaccatgttggccaggctggtcttgaacttctggcttcaggtgatccacctgcctcggcctcccaaagtgctgggattacaggtgtcagccactgcacccagccagttgatagcttttatgtttcactataaccatatattatcccaagaactttgccaaagtgttccatgataactcagctggaatgttatcttgtagttacgttcctcttgggcctggtacttaactatagcctttctttttgtctgatatccaaagcatctttcagcagcgtggttttaacattctacctacttattatcagcaggttcttgcggatattctaagttattgtttattagtacctcagttcaagattatgaactaactctgaagtgattaataaaaaatttaagtttccagccgggtgcgttggctcatgcctgtaatcccaacactttgggaggccgaggcagacagatcacgaggtcaggagttcgagacctggccaacatggggaaaccctctctctactaaaaatacaaaagtagccgggtgtggtggcacacacctatagtcccagctacatgggaggctgaggcaggagaatcacttgtacctgggggcggaggttgcagcgagctgaaagccaggatcgtgccactgcactccagcctgggcgacagagcaagactctctctcaaaaaaaaaaaaaaaaaaagtttccttagatctgtctgtccttaaaaccttgttaaaaatagagaaaggagaagagagaaagcttgaggagaaatagaaagagagagaaggtgataatgagtgaaaggaatgaacaataataaaagaggaaggacaagagccagtatggaatttttatgatgaagagctgctgggtgcacagttcatgagtctcttttacttttagcatttctcttgaacttgaatatataaaattccttttagagagttttcctgctacagtaaaacaaatgcaaaaaaaaattcttacacagttcagtttcttctaaaatcaagactgccttagaaaattctcctttgagggtaacaggtgactatctctctgtcttaaagttctgtcatgaagtactgttaaaccctaccttcatcaaaccaggtctataaatacaactgtaaatacaaaattaaatagaacagtattttctttataattgtttggcagtatcagtttataatagtagatatttttttgggagttgttttagagcactgaaaataagagttcaagatttttttttctcaaacaccgtttcagaaatatatcaattgtataggatggcagatgtatattaaaattccttcaaaatgtgtttatcagcttgccttcttctgtttatagacttatttgtgatacatttgatatatgatattttttctttctcctgagggttacatgttgggatttttttttcttttataatgctaccctcagtggaaagggtcaagaaccagtgggatggcacccagcatggcgttgagctaagacagcagcagcttgaggacatgattattgacagtcttcagtgggatgaccatagggaggagactgaagaactgatgagaaaatatgaggctcgactctatattcttcagcaagcccgacgggatccactcaccaaacaaatttctgataaccaagtaagactcatcagatattttttggcagtattgttttgttggatatactttttttctattgttcactgtaattcttaacaataggaccctgccatgttttttcctaagttcttagagtgtctaatgaaatttatatgaagaatttgatctggaagatttttttcgaaaaatttctggaggcataacaagtaagaatatgcatgtctccgagatttatagctcactgactttttgcaagtgaaacacaccctcaaatcagcatctagaaagagaacactttcaagattccaggaaccctcttttgctcccttctgtactgtattagtctgttctcacattgctataaataactacctgagactgagtaatttatgaagaaaggagatttaattgactcacagttcatttgagggctactgtagtgaagcatgactgggaggtaccaggaaacttaaaatcatggtggaaggcaaaggggaagcaggcaccttctttacaaggcagcaagacagagagagatagaagggagaagtgccacacattttatttatttattggagacattgtctcactctgccgcccaggctggaatgcagtggcactatctcagctcattgcaacagccacctcttgggttccagcgattcttgcctcagccttccaagtagctgggatgacaggcgtgcaccaccatgcccagctaatttttgtattttctgtagagacggggttccgccatgttgcccaggcttgtctgcaattcctgagctcaagtaatctgctcactttggcctcccaagtgtcacacactgttaaaccatctgatcttgtgagaactcactatcacaagaacagcacaggggaaattcatccccatgatccagtcacctcccaccaggctcctccttcgattggacatgagatttgggtggggacacaaatccaaaccatattacttacttaccctgaaggttatttttattaataagtttttccaagactttcatttgaggactactatagtgaacaaatcagataagtaagtttagtttcctttaatgactttttaaccaaactgttttatcaatttcgtaatagcagacatcttttttgtcatcagttcagttatagagttgataatattgaacaactatggtatttttaaaagtgcttttaagattctctgtataaaattataaaatattcttgaattggaggttttagttgtgaggttatagtttggtataacatttatttgcccttcagctagcctaagatggaagtgtatatttgtgaagaatttaagaaagtatatgtagaaaacaatcgaaaatgtggaagtatgtttttattctccacaaatgcagactttacttggttacagttttaaaagcaagtggccagttatatgcatttctggatcattctgtgtgtttgtgatactgctgactgtttccaccaaatgactcccaagtaatagtgaagcccctggccccttaactagaggaatacaattaaaagtgatgtcagtgtttcagttatcatattagaacattattttttaatcagcagtgtgattcttttcttctgaaaccttaggctgatttaaaatcttcccaattgctacaaaaagcattatattaaaggtttcagttgtcatttagatttcatggtgagtaccttgatccagagactctcagaggctgaaaaactatgtcaaagaaccaatgccagtggacaaattcagcatcagtttggctattcaagcaaactctcagtaaaccttgcttggcagcttgatccattcaagtggttatctttgtaaacacaccttgtgatccaggggcaagagatggaagacgtccatgttgttgattcttcacgtttctccaggcatgtatgcaggaac

SEQ ID NO: 279 - DNA, 4063 bp, Homo sapiens
taaatattgtgtatagtaaagactgattttgtaactattctgaaaacaggttaagtttcaaaaatttaattttgattgactttccaagtaattttgttgtatatttggaagcttctattatatctgttattactttttcagtaatgatgtttattgtccctatagattaataaaaatgaagcttttttcagcatttattctttgtccaatttggtcaattccttttaacagtgatcagtagaagatacttatattgggattgtttcataaggcctgatatcagccaggctcaaccttcaagctcttaaaaatgaatgctgtagcagctgtcattcccgaatgaatgggcttaggtgaaaagtacaggtagccttatcctcctagcatgcccaccaatatgaggttcagagatttgggtcagtcaacttgatttatcctctcggaagcttacttctttccctgaaaatcacctttatttttcaacttgttttgtttattttctttgctaggatttgatttttagttttcccttccaagctgggaataaagctggccaaaaagagaagggtaaaaattatagtcttctatattttcctcttctgttacgttgttttaatatttcaagtatcattttattactttttttaaaaaacaattgccaacaatgtctttgtgataaatgcctatgaatgttaatgttttcattttgtaaatatcaaactcaagcatgcggatattttctcagcacatttagctccatatcaaacaaactaaagagccaatgcccacagaaacaatgcccacagtctttgtttttgttttcatttgtttctttttccattaattgattaatcaaccagttaaacaagtatttatttagcttcctatttgccaagctctgtgaccagccctaaagattcaaccataaatacacctcattcctgctcccaggaagctgacattgcatagggggagcctgcaatgtacgtaagtggtaaataggaaaataatacataattataggaggttgttttggaggtaagagaaattaaagaggtgctatgtaagagagggacttaactgaggcaaatttagaaagcataacttggtggcatttgagctggttctgaaggttaagaaggaaccatctgaagaaaattacagagtgaacagcaaatataaaagtcatgaggcaggaaagagcacagcatgtggttgcaatataatgaatatgatggtaagagcttgagatgcggtaggagaggaaggcagaggccagatcatgctgagctttgtaagacatggggtattagtccgttttcatactgccataaagaactgcctgagactgggtaatttataaaggaaagagttttaactgacttatagttcagcatggcaggggagacctcaggaaacttacaatcatggcggaaggtgaaggggaagcaaggcaccttcttcacaaggtggcaggaagagaattgctgagtgaagggggaagagctccttataaaactatcagatcttgtgaaaactcactcattatcacgagaacaacatgggggaaaccatccccattatccaattatgtccacctggtctctcccttgacacatggggatataggggttataattcaaggtgagatttgggtgtggatacaaaacctaatcatatcacatgggaaggagtttggatattaaaagtacaatagaaagctattggaattgttaaggaagggagtgacactgtctaatgtgtatatatattaaaatttaatctctctggatcttatgtggataataggttgctagtgggtatagtagaataattgcgaagatcagaaaggaagtgatggttgtggtccaactgggacatggtggtccccgtggctactgtatgccagcaatgatggaaataagatgttagatttgcgatatgccttggaagtagaaaagacattttggtggattagatatatgccttaagggcttggaaacaatccaagatggtattttgtaaaaggatgagtggtggtaccattcaccgaattgggaaaggatgtgggagttttggaagaacaaaaattgcaagttggattttgttaagtttgagatgcctgttagatatctaagtatataggttaaataggcaattatgtatgttaatctggaactcagatgttctggacctcagatatgaattgagagttctcagcattcacattggaggttgaacatgtgggactggatgagatcaccagggaaggagtgaagatgaagaagagaggggtatgcttaactgagtccataaggcctagggtttggtgattgaacaaaaaaggaggaaggagcaaaagggactcagaaaaaatttccaatgaagtgaaaaaacgcagatttgtcatgttcagaaatagagggaggagaatatctcttagaggaaatggagagaggagaatgtttctaagaaagaatgatctactggattgaattgggctgaataaccaaataggatgacacagcacactattttggtaattccacagcttggacattcctggtgattttggaaagagcaatttggaggaagtaatgtggctggaagctagagagtgagatgaaggtgaagaagtagaaacagtttgtggaaacaactttagagaagtttgtgtgaagagggacagagattttaggtagtgcttagtgtgggggctgtaaggttaagagagtcgattgacttttctgttaaaatggattatagtaaagcatgtttgtgtgcctatgagaatgacccactagatgagagactgatgattaaatgcagaggggacaaaggaaggaggacaggaaggctttgagaagataagaaagtgagatttagagaattgggtttggtaagaactggaatgcatttttcattatgaccagaaaagtcaacgagaaggtgagtttagatgtacgtgaactagaccattagtggtggaagatgaaaggttctccatgcaagaactgagctttatgatctatcgagcacattgtcagtgaagttggaggtaggactaagagaagttggaagagagaggattgggtgtaagttcagatctttgtgagtgggatggagagtttcctagggtaaatatatggtattgctgggcagtaatgagtgcctatttgtggtttatattattaaatgtaaggaaaggtagccctgttgaactactctttaatagcattcatctactcaatgaggcaatgaagaagaatgcagatggaagtgggagaaagatggagcagggaagagtaagatctttggaaatgagaggagaacaggattgcctgtggtccataatagtgtctaatgtgtccctttctctgggtggtgtcattcctcactagagctatggcttggcaaacagaccttaagttggatttcaaacttcacttcctcattgaggcagtggtcaacctctatatacagtgcccctgaacctgaagctcagtataggaacagagtggatacatgtgttgtgctttctacagtgggattttgcctggaagatgggtgaacaataacctggaggtagcagtggggagcagggaggacccttattccagcttctcaaactgaggcataaaggatctgagagaaaaaggaaaagacttcatgaaaagtttgcagggaaccccatgcagtagctcatgtctgtaatccagcactttgggaggctgaggcaggtgaatcgcttgagtccaggagttccagactagcctgggaaatatggcaaaacctcatctctacaaaaaatacaaaaatcagctgggtgtggtgacacatgcctgtggtcccagctactagggaggctgaggtggtaggttcgattgagcctaggaggtggagattgcagtgagctgtgatcacaccactgcactccagccttggcgacagaaccagactctggaaaaaacaaaaagtttgcaggagaaataatggccctatggaaactggtttcagtgaagacaaaaagggattggcctggggagatggaaggtacagcaga

SEQ ID NO: 280 - DNA, 4041 bp, Homo sapiens
aggattattacacttttatctcctatgtttgcttttagcctcattttcatcgtcttgttccatagatgcagactttgattatagattgttttagattttctcctgtgcccagctgcatgcttagcactgtgtttgaggggtgaatgcctatctcatggggacttcatctgctggttctaggacaggaattatagcttcatacttatttaataacaactttcttggcatataattcacatactgtacagttcattcatttaaattttacaattcatttgtttctagtctattcacgattgtacgaccatcaccacaatcaagttagaacattttcattacctcagaaagaaaccccttccctttactagcaatttcccattcctccccgccaattccctcccctctgaacaatcactaatctatttctatctatttgccaaataccttaacattttatactctatcctttgaatatgttctccacttttggctttacacagatatggtgacattgttagcctcaccagagggaggcagtgtagattctcagtatggacctgcagggaaaaaagatacaggcagaagtccacagaacactgcctgatgaacacagttctataagacccaataaagtcggcaaagcactgcttgataaacaccgttctgtaagacacaatataggactttaaatcgttgtaacatgaaggactaagaaaggcaaatgaagtaaaggaggaaaaacaaatacttgaaaatactgcatttcttttaaagaatcatgacaacattagacagaggtgaaattgcagcattagcccggttaccagtttgagcaggacactgataatgagcaacatctgggttctatttctggctgtgctctttgacccagtcatttaatcatccagggttattttgcacatctcctgatagtactttaccccagttgatatttgcaatgatgttcaggctgcagtagagaatatgtctcaagtgtgtgtatatatatacacatagaaccccaaaattatgtactggatttttatatgatataattatggcctcatatttcctattcataaaattaaaacagctttatggcaaatacaatgagatcatgaagatgctgtctaaggggaaatgtggcaatttggaatgttcagtagtcaattacagacttttaattttttattcacttagctgtttaattagacaaatcctaacctattccatttctaatggctttccttctaggcaggcagatgagaatccactggatcgctctgcttttagggtgtcttagtcatataacccctgcaagtattttttgttttgctttatttttgttgttttgttttgttttaggtgattttgggctgagatctgtctgggggtgattttttagcacttaatgtatgggctgttgtcatcagagtcaggtgtacccttctgctcttctcaagatttataacagggtctcctgttcactaattcacagagcacagctagagctgcatttattgggtagtgaacatatccctctttagagacggtgaatgctctgttctctcttaatagaaaccagctacagggcatgcaccgtggtggtggcagtgatatgttgaatccctgttcccaggggatgtccgctttctatctgcagctttaatgtttcacttaatatcctctttggctactgagcgcactcctctcccgcagccggcagcgcttggctgctcgacaacttccttcatttctggccatgccgggctgagcaagtgctgcctgtgagcatctgctggggggctttctctgtggcgtttgtctgtgttttttaaattgagaagttgaaggaataccagcctcctttttcctagaacctaaccccctgtatctttcaaatgctttcctggaaacgagcatgctcagagaactgacaaatcattgtccagtgaccgggaggaaatgatcgttgctcttcatttataatgcaaattctgaggtgtctccagaagtgtggtaaacttaaaatgatggctgtggtgagaacgtctctgcagaaagttgtggttttgttgcatcgcttacaaaggatggcagtttcttctcctcggtatcagaagctctgtaaggtaactgagtgattgaaaataaggatctcgggtgtctgacagttctactgtttctcaggctctaaaaactaatctttcaggttcttatcaaggaaagattccctttcttagtaactgattgtgaaagctgttaaagtgaattgcataattacattttgtttaaaaatctaaaacaggttttagttttagtacatagtttcttttgcaattgacacaatcttgtcttctgagatgggctagtgaaatgtttggagaaaatatgatgcaaaactactacattcattaagacctgttacctctctggtactttgcagtatcttaatagtgaatggcacattaatcttatgtaaattttagtaaaattaaaagaagagtgccaaataatctttcagtagatttttaaaaaatgttccattgttttatagctaattgctttttcaattaaaacaattaaaagacattttaaaaaaatgatcagactgaatttcatcataaaacatcccctatattcttaaatctccatatattatagttacacttgaagaatttaatttcacttggatggatgaattaagtagacttactggagacaacttgtttgacagttgcaaatttctaatactacgtcatcccgaacataaaccattcaatcagctgctgtatttttttaagtcagctgttatatgtttgatcatagttttgttttattcaaactatgttgatactatgtcattacttttgtcaaaattagagtgttttgatataaaaggagagagttataatagcaatttttacactaccgcagtactatattcctccttcctatcatatttttagtaccgttctcaagaatgtatcttgttgctctgttagctgcccaaactcatttgtgatcaaaacaactgcctctaagaaaatattatttttctgatgatatacagtatggcatgtccaggcatctagatgatgcttatatggcagcagattgaggtgggaagcagtattccattaactttattatatcacactgtaatttcttacaatttggccaattagatatattgctgtctggaaactttttttttttccggaagttttgggagacagattcaggtagtggggtattcttttcagaaatacttacaagagttttatttgcataagaagttaattaaaacttaatggagcttaattaattcagttacaaagatttgtaaacctagttatttcaatgtgttgtgttttgctctacttcagtggataagtttattctggtaaaacatttatgtttttcatgaaaaggcaattttgataatagataagaaaagctcattcactaattcatgctatttaatttttttaactaccagtatgaatgtataaagctttcttttttttaagagcagggtcattttcctgatccgtttgtgtgtgtactttcacaaaaccaaatatttttctaaagtcgaaggtattaagttagtgcaaaagatgaaacagcagaagtcaagtattggagaaagttgctaattagtttgctaattctaccgcaaataggcacaagttaagtcactgaagtcattggataaattaccatcagaagtgctttttgggaagacttcttgatttataatttcctaaagataccatgaaaatttaaatgtttagaataaatgttacttatttcatttagagaattaaaatttacattatttgctgttgaaatactatcttccacgtattctttcccatatgcaaaattaacaactgcctgattaacgcaatgagaaatgtacaattccagtacattgcagcaggtgtcagtataaggcagtgacataggagattttgcctaaagaactggaaatccagattaggaagcggcacaattactatgaaataaataaac

SEQ ID NO: 281 - DNA, 4024 bp, Homo sapiens
acaatataggactttaaatcgttgtaacatgaaggactaagaaaggcaaatgaagtaaaggaggaaaaacaaatacttgaaaatactgcatttcttttaaagaatcatgacaacattagacagaggtgaaattgcagcattagcccggttaccagtttgagcaggacactgataatgagcaacatctgggttctatttctggctgtgctctttgacccagtcatttaatcatccagggttattttgcacatctcctgatagtactttaccccagttgatatttgcaatgatgttcaggctgcagtagagaatatgtctcaagtgtgtgtatatatatacacatagaaccccaaaattatgtactggatttttatatgatataattatggcctcatatttcctattcataaaattaaaacagctttatggcaaatacaatgagatcatgaagatgctgtctaaggggaaatgtggcaatttggaatgttcagtagtcaattacagacttttaattttttattcacttagctgtttaattagacaaatcctaacctattccatttctaatggctttccttctaggcaggcagatgagaatccactggatcgctctgcttttagggtgtcttagtcatataacccctgcaagtattttttgttttgctttatttttgttgttttgttttgttttaggtgattttgggctgagatctgtctgggggtgattttttagcacttaatgtatgggctgttgtcatcagagtcaggtgtacccttctgctcttctcaagatttataacagggtctcctgttcactaattcacagagcacagctagagctgcatttattgggtagtgaacatatccctctttagagacggtgaatgctctgttctctcttaatagaaaccagctacagggcatgcaccgtggtggtggcagtgatatgttgaatccctgttcccaggggatgtccgctttctatctgcagctttaatgtttcacttaatatcctctttggctactgagcgcactcctctcccgcagccggcagcgcttggctgctcgacaacttccttcatttctggccatgccgggctgagcaagtgctgcctgtgagcatctgctggggggctttctctgtggcgtttgtctgtgttttttaaattgagaagttgaaggaataccagcctcctttttcctagaacctaaccccctgtatctttcaaatgctttcctggaaacgagcatgctcagagaactgacaaatcattgtccagtgaccgggaggaaatgatcgttgctcttcatttataatgcaaattctgaggtgtctccagaagtgtggtaaacttaaaatgatggctgtggtgagaacgtctctgcagaaagttgtggttttgttgcatcgcttacaaaggatggcagtttcttctcctcggtatcagaagctctgtaaggtaactgagtgattgaaaataaggatctcgggtgtctgacagttctactgtttctcaggctctaaaaactaatctttcaggttcttatcaaggaaagattccctttcttagtaactgattgtgaaagctgttaaagtgaattgcataattacattttgtttaaaaatctaaaacaggttttagttttagtacatagtttcttttgcaattgacacaatcttgtcttctgagatgggctagtgaaatgtttggagaaaatatgatgcaaaactactacattcattaagacctgttacctctctggtactttgcagtatcttaatagtgaatggcacattaatcttatgtaaattttagtaaaattaaaagaagagtgccaaataatctttcagtagatttttaaaaaatgttccattgttttatagctaattgctttttcaattaaaacaattaaaagacattttaaaaaaatgatcagactgaatttcatcataaaacatcccctatattcttaaatctccatatattatagttacacttgaagaatttaatttcacttggatggatgaattaagtagacttactggagacaacttgtttgacagttgcaaatttctaatactacgtcatcccgaacataaaccattcaatcagctgctgtatttttttaagtcagctgttatatgtttgatcatagttttgttttattcaaactatgttgatactatgtcattacttttgtcaaaattagagtgttttgatataaaaggagagagttataatagcaatttttacactaccgcagtactatattcctccttcctatcatatttttagtaccgttctcaagaatgtatcttgttgctctgttagctgcccaaactcatttgtgatcaaaacaactgcctctaagaaaatattatttttctgatgatatacagtatggcatgtccaggcatctagatgatgcttatatggcagcagattgaggtgggaagcagtattccattaactttattatatcacactgtaatttcttacaatttggccaattagatatattgctgtctggaaactttttttttttccggaagttttgggagacagattcaggtagtggggtattcttttcagaaatacttacaagagttttatttgcataagaagttaattaaaacttaatggagcttaattaattcagttacaaagatttgtaaacctagttatttcaatgtgttgtgttttgctctacttcagtggataagtttattctggtaaaacatttatgtttttcatgaaaaggcaattttgataatagataagaaaagctcattcactaattcatgctatttaatttttttaactaccagtatgaatgtataaagctttcttttttttaagagcagggtcattttcctgatccgtttgtgtgtgtactttcacaaaaccaaatatttttctaaagtcgaaggtattaagttagtgcaaaagatgaaacagcagaagtcaagtattggagaaagttgctaattagtttgctaattctaccgcaaataggcacaagttaagtcactgaagtcattggataaattaccatcagaagtgctttttgggaagacttcttgatttataatttcctaaagataccatgaaaatttaaatgtttagaataaatgttacttatttcatttagagaattaaaatttacattatttgctgttgaaatactatcttccacgtattctttcccatatgcaaaattaacaactgcctgattaacgcaatgagaaatgtacaattccagtacattgcagcaggtgtcagtataaggcagtgacataggagattttgcctaaagaactggaaatccagattaggaagcggcacaattactatgaaataaataaactagtaacagataaattttatttgtgtggttatattttgaaaactgatctaagttattgagctatattaatgtaatgaaatgaaaatttagttgtagacttaaatattaacagttgccatctcaaatattgatagaggtagctataccaaccaaaaatacttaattgtattttaattatcaatagtccatgtgtcatacctaaaagtttaaatgggtttgacatttatttgctttaagacactgtaaattcccttcccattaaattgtaaatgctgtcttgactttctccttattcctcccacattctctaaatttagtttcttagaaaaaaatgctttaagtttgtgtatctccataaaaatacagaaacagtctattgtaaatacatgtagagaccaaaatgaatgagaataaaatgtggcataatctgagggaaatttgactatttaaaattcatattggcattttgaaattcagtgtctgaatatttttatcttcttttaaattcctcttgaggatcattctttttatgtattatttgtttagtcttttgttagacttttccctctgtggcagctcgtcttttctgcttattttcatacttctcttgtttgtcagaagatagtgtgtgtgttacacgagtagatacttgtgt

SEQ ID NO: 282 - DNA, 4024 bp, Homo sapiens
tggctgctcgacaacttccttcatttctggccatgccgggctgagcaagtgctgcctgtgagcatctgctggggggctttctctgtggcgtttgtctgtgttttttaaattgagaagttgaaggaataccagcctcctttttcctagaacctaaccccctgtatctttcaaatgctttcctggaaacgagcatgctcagagaactgacaaatcattgtccagtgaccgggaggaaatgatcgttgctcttcatttataatgcaaattctgaggtgtctccagaagtgtggtaaacttaaaatgatggctgtggtgagaacgtctctgcagaaagttgtggttttgttgcatcgcttacaaaggatggcagtttcttctcctcggtatcagaagctctgtaaggtaactgagtgattgaaaataaggatctcgggtgtctgacagttctactgtttctcaggctctaaaaactaatctttcaggttcttatcaaggaaagattccctttcttagtaactgattgtgaaagctgttaaagtgaattgcataattacattttgtttaaaaatctaaaacaggttttagttttagtacatagtttcttttgcaattgacacaatcttgtcttctgagatgggctagtgaaatgtttggagaaaatatgatgcaaaactactacattcattaagacctgttacctctctggtactttgcagtatcttaatagtgaatggcacattaatcttatgtaaattttagtaaaattaaaagaagagtgccaaataatctttcagtagatttttaaaaaatgttccattgttttatagctaattgctttttcaattaaaacaattaaaagacattttaaaaaaatgatcagactgaatttcatcataaaacatcccctatattcttaaatctccatatattatagttacacttgaagaatttaatttcacttggatggatgaattaagtagacttactggagacaacttgtttgacagttgcaaatttctaatactacgtcatcccgaacataaaccattcaatcagctgctgtatttttttaagtcagctgttatatgtttgatcatagttttgttttattcaaactatgttgatactatgtcattacttttgtcaaaattagagtgttttgatataaaaggagagagttataatagcaatttttacactaccgcagtactatattcctccttcctatcatatttttagtaccgttctcaagaatgtatcttgttgctctgttagctgcccaaactcatttgtgatcaaaacaactgcctctaagaaaatattatttttctgatgatatacagtatggcatgtccaggcatctagatgatgcttatatggcagcagattgaggtgggaagcagtattccattaactttattatatcacactgtaatttcttacaatttggccaattagatatattgctgtctggaaactttttttttttccggaagttttgggagacagattcaggtagtggggtattcttttcagaaatacttacaagagttttatttgcataagaagttaattaaaacttaatggagcttaattaattcagttacaaagatttgtaaacctagttatttcaatgtgttgtgttttgctctacttcagtggataagtttattctggtaaaacatttatgtttttcatgaaaaggcaattttgataatagataagaaaagctcattcactaattcatgctatttaatttttttaactaccagtatgaatgtataaagctttcttttttttaagagcagggtcattttcctgatccgtttgtgtgtgtactttcacaaaaccaaatatttttctaaagtcgaaggtattaagttagtgcaaaagatgaaacagcagaagtcaagtattggagaaagttgctaattagtttgctaattctaccgcaaataggcacaagttaagtcactgaagtcattggataaattaccatcagaagtgctttttgggaagacttcttgatttataatttcctaaagataccatgaaaatttaaatgtttagaataaatgttacttatttcatttagagaattaaaatttacattatttgctgttgaaatactatcttccacgtattctttcccatatgcaaaattaacaactgcctgattaacgcaatgagaaatgtacaattccagtacattgcagcaggtgtcagtataaggcagtgacataggagattttgcctaaagaactggaaatccagattaggaagcggcacaattactatgaaataaataaactagtaacagataaattttatttgtgtggttatattttgaaaactgatctaagttattgagctatattaatgtaatgaaatgaaaatttagttgtagacttaaatattaacagttgccatctcaaatattgatagaggtagctataccaaccaaaaatacttaattgtattttaattatcaatagtccatgtgtcatacctaaaagtttaaatgggtttgacatttatttgctttaagacactgtaaattcccttcccattaaattgtaaatgctgtcttgactttctccttattcctcccacattctctaaatttagtttcttagaaaaaaatgctttaagtttgtgtatctccataaaaatacagaaacagtctattgtaaatacatgtagagaccaaaatgaatgagaataaaatgtggcataatctgagggaaatttgactatttaaaattcatattggcattttgaaattcagtgtctgaatatttttatcttcttttaaattcctcttgaggatcattctttttatgtattatttgtttagtcttttgttagacttttccctctgtggcagctcgtcttttctgcttattttcatacttctcttgtttgtcagaagatagtgtgtgtgttacacgagtagatacttgtgtagaatattctcattttgtgggttttcttgtatgtttcaaagagaagggaggaatgaaaaaaggcatgtcacagctctcagagttaaaatatactcccctcccacaatctatttacacattcacgtgtattttttgcctttaaaaatatttcttctcggttatacatccaataaaatttgagcaggaagcaaaaacgtaagtgctgcttacttggagatataattagcagcattgaaattgccctgatgacctaaaatcaccctacactggatgctaattttctcagatatggttttgtttgcttagtttctttaaaattttcatgcctataaaataatttttcttttagtagagcacagtagaaaaaaagctgatgtaaatgatttgaaaaataatattgaatttaatttgtttttattgttacgtgattactttggggtgttttatatcatgaagtctttagattagaactgggttatttgtgttaatgttaaatcagaagagatttttgtaagtcctccttatttttttcttagtgccaatttctgtaaaatatttagcaattgagggcatggtaaaaagcagtttcctgtaaagtagattgggatatgaacattatagaaaaatgagaaaaatttaaaaatatttagtgctgtaaattgactccttcgtgactcaagcattttagaaaatgttgatttaagtgatataacttctatttgcttgaatgtatatgtaaatcattttagtttaagtggttttagtcaccccccaaactattctgatcatatttcttcagcaaaaatcttttaaacatctagctgtatatagatgtgtattcatttaaaaattatacatatatgccatggtgaaatcatgtattaaatattagtagtgtataattttgttcttactttctactgttgcctttttgtaccacagttgattctttttctctatgtggtatacacaacacgattttggtgactagtcatttacatacagagtgaaactatggctattcttagcctggccttctagggggcttgagctttcag

SEQ ID NO: 283 - DNA, 4030 bp, Homo sapiens
ctgttacctctctggtactttgcagtatcttaatagtgaatggcacattaatcttatgtaaattttagtaaaattaaaagaagagtgccaaataatctttcagtagatttttaaaaaatgttccattgttttatagctaattgctttttcaattaaaacaattaaaagacattttaaaaaaatgatcagactgaatttcatcataaaacatcccctatattcttaaatctccatatattatagttacacttgaagaatttaatttcacttggatggatgaattaagtagacttactggagacaacttgtttgacagttgcaaatttctaatactacgtcatcccgaacataaaccattcaatcagctgctgtatttttttaagtcagctgttatatgtttgatcatagttttgttttattcaaactatgttgatactatgtcattacttttgtcaaaattagagtgttttgatataaaaggagagagttataatagcaatttttacactaccgcagtactatattcctccttcctatcatatttttagtaccgttctcaagaatgtatcttgttgctctgttagctgcccaaactcatttgtgatcaaaacaactgcctctaagaaaatattatttttctgatgatatacagtatggcatgtccaggcatctagatgatgcttatatggcagcagattgaggtgggaagcagtattccattaactttattatatcacactgtaatttcttacaatttggccaattagatatattgctgtctggaaactttttttttttccggaagttttgggagacagattcaggtagtggggtattcttttcagaaatacttacaagagttttatttgcataagaagttaattaaaacttaatggagcttaattaattcagttacaaagatttgtaaacctagttatttcaatgtgttgtgttttgctctacttcagtggataagtttattctggtaaaacatttatgtttttcatgaaaaggcaattttgataatagataagaaaagctcattcactaattcatgctatttaatttttttaactaccagtatgaatgtataaagctttcttttttttaagagcagggtcattttcctgatccgtttgtgtgtgtactttcacaaaaccaaatatttttctaaagtcgaaggtattaagttagtgcaaaagatgaaacagcagaagtcaagtattggagaaagttgctaattagtttgctaattctaccgcaaataggcacaagttaagtcactgaagtcattggataaattaccatcagaagtgctttttgggaagacttcttgatttataatttcctaaagataccatgaaaatttaaatgtttagaataaatgttacttatttcatttagagaattaaaatttacattatttgctgttgaaatactatcttccacgtattctttcccatatgcaaaattaacaactgcctgattaacgcaatgagaaatgtacaattccagtacattgcagcaggtgtcagtataaggcagtgacataggagattttgcctaaagaactggaaatccagattaggaagcggcacaattactatgaaataaataaactagtaacagataaattttatttgtgtggttatattttgaaaactgatctaagttattgagctatattaatgtaatgaaatgaaaatttagttgtagacttaaatattaacagttgccatctcaaatattgatagaggtagctataccaaccaaaaatacttaattgtattttaattatcaatagtccatgtgtcatacctaaaagtttaaatgggtttgacatttatttgctttaagacactgtaaattcccttcccattaaattgtaaatgctgtcttgactttctccttattcctcccacattctctaaatttagtttcttagaaaaaaatgctttaagtttgtgtatctccataaaaatacagaaacagtctattgtaaatacatgtagagaccaaaatgaatgagaataaaatgtggcataatctgagggaaatttgactatttaaaattcatattggcattttgaaattcagtgtctgaatatttttatcttcttttaaattcctcttgaggatcattctttttatgtattatttgtttagtcttttgttagacttttccctctgtggcagctcgtcttttctgcttattttcatacttctcttgtttgtcagaagatagtgtgtgtgttacacgagtagatacttgtgtagaatattctcattttgtgggttttcttgtatgtttcaaagagaagggaggaatgaaaaaaggcatgtcacagctctcagagttaaaatatactcccctcccacaatctatttacacattcacgtgtattttttgcctttaaaaatatttcttctcggttatacatccaataaaatttgagcaggaagcaaaaacgtaagtgctgcttacttggagatataattagcagcattgaaattgccctgatgacctaaaatcaccctacactggatgctaattttctcagatatggttttgtttgcttagtttctttaaaattttcatgcctataaaataatttttcttttagtagagcacagtagaaaaaaagctgatgtaaatgatttgaaaaataatattgaatttaatttgtttttattgttacgtgattactttggggtgttttatatcatgaagtctttagattagaactgggttatttgtgttaatgttaaatcagaagagatttttgtaagtcctccttatttttttcttagtgccaatttctgtaaaatatttagcaattgagggcatggtaaaaagcagtttcctgtaaagtagattgggatatgaacattatagaaaaatgagaaaaatttaaaaatatttagtgctgtaaattgactccttcgtgactcaagcattttagaaaatgttgatttaagtgatataacttctatttgcttgaatgtatatgtaaatcattttagtttaagtggttttagtcaccccccaaactattctgatcatatttcttcagcaaaaatcttttaaacatctagctgtatatagatgtgtattcatttaaaaattatacatatatgccatggtgaaatcatgtattaaatattagtagtgtataattttgttcttactttctactgttgcctttttgtaccacagttgattctttttctctatgtggtatacacaacacgattttggtgactagtcatttacatacagagtgaaactatggctattcttagcctggccttctagggggcttgagctttcagtgtggtgctgatctcaaagtcttccccggaatactgtgtcttctgtggtattaaagcaactacttctgaatattctgtgaaaaatagaagagaccagaagattccacctgggaagtcacgattgaccagtgatgtctacaaaaggcttgctttgtggctgtgtgtgtgtgttttcatgtgtggacgtggacaacacagaactatgtagttgcttgtagtgctaatgagtaaatagataatgaacatgaaggcacattaatctctcagcaggtttttatgttcactgatgaagtaaggtcacatattatttttcatctacatgtacagctccctgtatttagaggtagttaaggttgagtatgtggttttttagaagacactgaatggagtggtgtattttcgaccggttgaattttgtattttttactctcaaacatttccccacctttttttcacaggagaaccctgctctccttggacaattaaatcctgaagtgatccagggcaatggagatttactttaacatgatctgattgttgagatgtgtgtattttaaggtcaactcttggattccctcagtttctctcaataaccaactcatacatagattgtttgaaccatggagctcagagtcatgaccctctagtctgcaagttagaattcccacttgatcatatgagttgtctcttcttggct

SEQ ID NO: 284 - DNA, 4044 bp, Homo sapiens
acatttatttgctttaagacactgtaaattcccttcccattaaattgtaaatgctgtcttgactttctccttattcctcccacattctctaaatttagtttcttagaaaaaaatgctttaagtttgtgtatctccataaaaatacagaaacagtctattgtaaatacatgtagagaccaaaatgaatgagaataaaatgtggcataatctgagggaaatttgactatttaaaattcatattggcattttgaaattcagtgtctgaatatttttatcttcttttaaattcctcttgaggatcattctttttatgtattatttgtttagtcttttgttagacttttccctctgtggcagctcgtcttttctgcttattttcatacttctcttgtttgtcagaagatagtgtgtgtgttacacgagtagatacttgtgtagaatattctcattttgtgggttttcttgtatgtttcaaagagaagggaggaatgaaaaaaggcatgtcacagctctcagagttaaaatatactcccctcccacaatctatttacacattcacgtgtattttttgcctttaaaaatatttcttctcggttatacatccaataaaatttgagcaggaagcaaaaacgtaagtgctgcttacttggagatataattagcagcattgaaattgccctgatgacctaaaatcaccctacactggatgctaattttctcagatatggttttgtttgcttagtttctttaaaattttcatgcctataaaataatttttcttttagtagagcacagtagaaaaaaagctgatgtaaatgatttgaaaaataatattgaatttaatttgtttttattgttacgtgattactttggggtgttttatatcatgaagtctttagattagaactgggttatttgtgttaatgttaaatcagaagagatttttgtaagtcctccttatttttttcttagtgccaatttctgtaaaatatttagcaattgagggcatggtaaaaagcagtttcctgtaaagtagattgggatatgaacattatagaaaaatgagaaaaatttaaaaatatttagtgctgtaaattgactccttcgtgactcaagcattttagaaaatgttgatttaagtgatataacttctatttgcttgaatgtatatgtaaatcattttagtttaagtggttttagtcaccccccaaactattctgatcatatttcttcagcaaaaatcttttaaacatctagctgtatatagatgtgtattcatttaaaaattatacatatatgccatggtgaaatcatgtattaaatattagtagtgtataattttgttcttactttctactgttgcctttttgtaccacagttgattctttttctctatgtggtatacacaacacgattttggtgactagtcatttacatacagagtgaaactatggctattcttagcctggccttctagggggcttgagctttcagtgtggtgctgatctcaaagtcttccccggaatactgtgtcttctgtggtattaaagcaactacttctgaatattctgtgaaaaatagaagagaccagaagattccacctgggaagtcacgattgaccagtgatgtctacaaaaggcttgctttgtggctgtgtgtgtgtgttttcatgtgtggacgtggacaacacagaactatgtagttgcttgtagtgctaatgagtaaatagataatgaacatgaaggcacattaatctctcagcaggtttttatgttcactgatgaagtaaggtcacatattatttttcatctacatgtacagctccctgtatttagaggtagttaaggttgagtatgtggttttttagaagacactgaatggagtggtgtattttcgaccggttgaattttgtattttttactctcaaacatttccccacctttttttcacaggagaaccctgctctccttggacaattaaatcctgaagtgatccagggcaatggagatttactttaacatgatctgattgttgagatgtgtgtattttaaggtcaactcttggattccctcagtttctctcaataaccaactcatacatagattgtttgaaccatggagctcagagtcatgaccctctagtctgcaagttagaattcccacttgatcatatgagttgtctcttcttggcttcatgagaaagtcttggttagattagtacagaaactgtgtgaaggttgaggtttaatggagaaaaatggcgtatgtagatgggtttgcctccatctaaccctctctatggatgctgtaggtgtgtttcctgggagctgtatggatacccacacagactactttctctactctgcgtttgtttctgcacttcctagtcaggtcaagattacagacaaaagtgagacgggatcaaggagaaaacacctgcacccctgcctgccactatcagacatgattcctgtggcttccaagagcacaagtgccattttagaaagctcttggacctctgttttgctgtagttccccaagttgatatgtgttgtcaaaattatgtttttaaaaagttatccaattaactaacattttcttaatcagaaaactcatgctatcaatgacttggataaagtcaatataattagctaaaaacagtataattagatctgatgcaatgctttgtcactcacttaaagaataactaatacattctataaggtagcattttaaaattcttttatagccaagatatcattatcattggtgtatgtctagaagtgtaatactagtacaaatccggaacaaatagaaggtccttctgagatggagttgaagtagtattaaggatacggataaaaggtctcttttatttgtagagtattatttgataattgtaacttaaagggttgatgatttgtgttttcctagaggcaaagtttattaaatttcaagtggaaatttcctagctgtaggtactgctagattttaaatgtgcagacatagctccttcctcttactcttaactgtgatcactaccaacttctcttagtatatttggtagtttatttttagttctctaaaataagtaattagtagagttcctaccatagagataaaagaatgtagaaaatgttatgccttggtagctttctcagtttcacaaagcttattcatttctgggcgaggtaaatgagtccaaataattgaaattggaaaggatgtgaagtgcatcagagggttgcttttcatttttcatcttctagtttgttcagttctgtggaactctaaaaagattaatttataacaaagctcacttataaaagcagacagtgccttttagtgcttaataaataataggcttatgtgaaagtatggcttcataaagttaagcaagaattttggaaaaacatcaaatggaagaagatgttgaactgtttgcacaatagacaactattttgtttttattttaacagaattgagagaaaaatggctgactacaacaatagaataactgttagctgttatgatgggaaaatatcttgatactgctagtacagtttccttacatttttagtattttagagtttacaatgtgttttctcatatattacatcattaataaatgtaatattaacaatattatattatcttgtgtccttaagagatagataggaaagaaatttgttttgcaagtcagcaagtgaaggaacatgccagtagttagttgctcagctagtatgcggtgcagcttgtgttcaacatagattttctgcttcaatagccagtgtctctctacctgtaattttagatagagaatttttggaattatattgggataaaatgggtcactcagtatagaagatatagaaagagagattacattaactaagtaatagatattgttttgttctgaattatttccatatgcatttccttgtctaaagaaatttcacctgcagtctcctttaaaacatgagctggagcatgagaacattccatgttcctttaaaacatggaattctggagaatgaggagatgt

SEQ ID NO: 285 - DNA, 4023 bp, Homo sapiens
ataaaatgtggcataatctgagggaaatttgactatttaaaattcatattggcattttgaaattcagtgtctgaatatttttatcttcttttaaattcctcttgaggatcattctttttatgtattatttgtttagtcttttgttagacttttccctctgtggcagctcgtcttttctgcttattttcatacttctcttgtttgtcagaagatagtgtgtgtgttacacgagtagatacttgtgtagaatattctcattttgtgggttttcttgtatgtttcaaagagaagggaggaatgaaaaaaggcatgtcacagctctcagagttaaaatatactcccctcccacaatctatttacacattcacgtgtattttttgcctttaaaaatatttcttctcggttatacatccaataaaatttgagcaggaagcaaaaacgtaagtgctgcttacttggagatataattagcagcattgaaattgccctgatgacctaaaatcaccctacactggatgctaattttctcagatatggttttgtttgcttagtttctttaaaattttcatgcctataaaataatttttcttttagtagagcacagtagaaaaaaagctgatgtaaatgatttgaaaaataatattgaatttaatttgtttttattgttacgtgattactttggggtgttttatatcatgaagtctttagattagaactgggttatttgtgttaatgttaaatcagaagagatttttgtaagtcctccttatttttttcttagtgccaatttctgtaaaatatttagcaattgagggcatggtaaaaagcagtttcctgtaaagtagattgggatatgaacattatagaaaaatgagaaaaatttaaaaatatttagtgctgtaaattgactccttcgtgactcaagcattttagaaaatgttgatttaagtgatataacttctatttgcttgaatgtatatgtaaatcattttagtttaagtggttttagtcaccccccaaactattctgatcatatttcttcagcaaaaatcttttaaacatctagctgtatatagatgtgtattcatttaaaaattatacatatatgccatggtgaaatcatgtattaaatattagtagtgtataattttgttcttactttctactgttgcctttttgtaccacagttgattctttttctctatgtggtatacacaacacgattttggtgactagtcatttacatacagagtgaaactatggctattcttagcctggccttctagggggcttgagctttcagtgtggtgctgatctcaaagtcttccccggaatactgtgtcttctgtggtattaaagcaactacttctgaatattctgtgaaaaatagaagagaccagaagattccacctgggaagtcacgattgaccagtgatgtctacaaaaggcttgctttgtggctgtgtgtgtgtgttttcatgtgtggacgtggacaacacagaactatgtagttgcttgtagtgctaatgagtaaatagataatgaacatgaaggcacattaatctctcagcaggtttttatgttcactgatgaagtaaggtcacatattatttttcatctacatgtacagctccctgtatttagaggtagttaaggttgagtatgtggttttttagaagacactgaatggagtggtgtattttcgaccggttgaattttgtattttttactctcaaacatttccccacctttttttcacaggagaaccctgctctccttggacaattaaatcctgaagtgatccagggcaatggagatttactttaacatgatctgattgttgagatgtgtgtattttaaggtcaactcttggattccctcagtttctctcaataaccaactcatacatagattgtttgaaccatggagctcagagtcatgaccctctagtctgcaagttagaattcccacttgatcatatgagttgtctcttcttggcttcatgagaaagtcttggttagattagtacagaaactgtgtgaaggttgaggtttaatggagaaaaatggcgtatgtagatgggtttgcctccatctaaccctctctatggatgctgtaggtgtgtttcctgggagctgtatggatacccacacagactactttctctactctgcgtttgtttctgcacttcctagtcaggtcaagattacagacaaaagtgagacgggatcaaggagaaaacacctgcacccctgcctgccactatcagacatgattcctgtggcttccaagagcacaagtgccattttagaaagctcttggacctctgttttgctgtagttccccaagttgatatgtgttgtcaaaattatgtttttaaaaagttatccaattaactaacattttcttaatcagaaaactcatgctatcaatgacttggataaagtcaatataattagctaaaaacagtataattagatctgatgcaatgctttgtcactcacttaaagaataactaatacattctataaggtagcattttaaaattcttttatagccaagatatcattatcattggtgtatgtctagaagtgtaatactagtacaaatccggaacaaatagaaggtccttctgagatggagttgaagtagtattaaggatacggataaaaggtctcttttatttgtagagtattatttgataattgtaacttaaagggttgatgatttgtgttttcctagaggcaaagtttattaaatttcaagtggaaatttcctagctgtaggtactgctagattttaaatgtgcagacatagctccttcctcttactcttaactgtgatcactaccaacttctcttagtatatttggtagtttatttttagttctctaaaataagtaattagtagagttcctaccatagagataaaagaatgtagaaaatgttatgccttggtagctttctcagtttcacaaagcttattcatttctgggcgaggtaaatgagtccaaataattgaaattggaaaggatgtgaagtgcatcagagggttgcttttcatttttcatcttctagtttgttcagttctgtggaactctaaaaagattaatttataacaaagctcacttataaaagcagacagtgccttttagtgcttaataaataataggcttatgtgaaagtatggcttcataaagttaagcaagaattttggaaaaacatcaaatggaagaagatgttgaactgtttgcacaatagacaactattttgtttttattttaacagaattgagagaaaaatggctgactacaacaatagaataactgttagctgttatgatgggaaaatatcttgatactgctagtacagtttccttacatttttagtattttagagtttacaatgtgttttctcatatattacatcattaataaatgtaatattaacaatattatattatcttgtgtccttaagagatagataggaaagaaatttgttttgcaagtcagcaagtgaaggaacatgccagtagttagttgctcagctagtatgcggtgcagcttgtgttcaacatagattttctgcttcaatagccagtgtctctctacctgtaattttagatagagaatttttggaattatattgggataaaatgggtcactcagtatagaagatatagaaagagagattacattaactaagtaatagatattgttttgttctgaattatttccatatgcatttccttgtctaaagaaatttcacctgcagtctcctttaaaacatgagctggagcatgagaacattccatgttcctttaaaacatggaattctggagaatgaggagatgttggaaatcatctgattcaaccatttcattttggacataaggaaacagagatagtctataatggatgttttattgctgacagctttttttttttctttttttgagacagggtctctgtcacacaggctggagtacagtggtgctatcatggctcactgcagccttgacctc

SEQ ID NO: 286 - DNA, 4045 bp, Homo sapiens
tcattttagtttaagtggttttagtcaccccccaaactattctgatcatatttcttcagcaaaaatcttttaaacatctagctgtatatagatgtgtattcatttaaaaattatacatatatgccatggtgaaatcatgtattaaatattagtagtgtataattttgttcttactttctactgttgcctttttgtaccacagttgattctttttctctatgtggtatacacaacacgattttggtgactagtcatttacatacagagtgaaactatggctattcttagcctggccttctagggggcttgagctttcagtgtggtgctgatctcaaagtcttccccggaatactgtgtcttctgtggtattaaagcaactacttctgaatattctgtgaaaaatagaagagaccagaagattccacctgggaagtcacgattgaccagtgatgtctacaaaaggcttgctttgtggctgtgtgtgtgtgttttcatgtgtggacgtggacaacacagaactatgtagttgcttgtagtgctaatgagtaaatagataatgaacatgaaggcacattaatctctcagcaggtttttatgttcactgatgaagtaaggtcacatattatttttcatctacatgtacagctccctgtatttagaggtagttaaggttgagtatgtggttttttagaagacactgaatggagtggtgtattttcgaccggttgaattttgtattttttactctcaaacatttccccacctttttttcacaggagaaccctgctctccttggacaattaaatcctgaagtgatccagggcaatggagatttactttaacatgatctgattgttgagatgtgtgtattttaaggtcaactcttggattccctcagtttctctcaataaccaactcatacatagattgtttgaaccatggagctcagagtcatgaccctctagtctgcaagttagaattcccacttgatcatatgagttgtctcttcttggcttcatgagaaagtcttggttagattagtacagaaactgtgtgaaggttgaggtttaatggagaaaaatggcgtatgtagatgggtttgcctccatctaaccctctctatggatgctgtaggtgtgtttcctgggagctgtatggatacccacacagactactttctctactctgcgtttgtttctgcacttcctagtcaggtcaagattacagacaaaagtgagacgggatcaaggagaaaacacctgcacccctgcctgccactatcagacatgattcctgtggcttccaagagcacaagtgccattttagaaagctcttggacctctgttttgctgtagttccccaagttgatatgtgttgtcaaaattatgtttttaaaaagttatccaattaactaacattttcttaatcagaaaactcatgctatcaatgacttggataaagtcaatataattagctaaaaacagtataattagatctgatgcaatgctttgtcactcacttaaagaataactaatacattctataaggtagcattttaaaattcttttatagccaagatatcattatcattggtgtatgtctagaagtgtaatactagtacaaatccggaacaaatagaaggtccttctgagatggagttgaagtagtattaaggatacggataaaaggtctcttttatttgtagagtattatttgataattgtaacttaaagggttgatgatttgtgttttcctagaggcaaagtttattaaatttcaagtggaaatttcctagctgtaggtactgctagattttaaatgtgcagacatagctccttcctcttactcttaactgtgatcactaccaacttctcttagtatatttggtagtttatttttagttctctaaaataagtaattagtagagttcctaccatagagataaaagaatgtagaaaatgttatgccttggtagctttctcagtttcacaaagcttattcatttctgggcgaggtaaatgagtccaaataattgaaattggaaaggatgtgaagtgcatcagagggttgcttttcatttttcatcttctagtttgttcagttctgtggaactctaaaaagattaatttataacaaagctcacttataaaagcagacagtgccttttagtgcttaataaataataggcttatgtgaaagtatggcttcataaagttaagcaagaattttggaaaaacatcaaatggaagaagatgttgaactgtttgcacaatagacaactattttgtttttattttaacagaattgagagaaaaatggctgactacaacaatagaataactgttagctgttatgatgggaaaatatcttgatactgctagtacagtttccttacatttttagtattttagagtttacaatgtgttttctcatatattacatcattaataaatgtaatattaacaatattatattatcttgtgtccttaagagatagataggaaagaaatttgttttgcaagtcagcaagtgaaggaacatgccagtagttagttgctcagctagtatgcggtgcagcttgtgttcaacatagattttctgcttcaatagccagtgtctctctacctgtaattttagatagagaatttttggaattatattgggataaaatgggtcactcagtatagaagatatagaaagagagattacattaactaagtaatagatattgttttgttctgaattatttccatatgcatttccttgtctaaagaaatttcacctgcagtctcctttaaaacatgagctggagcatgagaacattccatgttcctttaaaacatggaattctggagaatgaggagatgttggaaatcatctgattcaaccatttcattttggacataaggaaacagagatagtctataatggatgttttattgctgacagctttttttttttctttttttgagacagggtctctgtcacacaggctggagtacagtggtgctatcatggctcactgcagccttgacctcctgggctcaagctatcctcccgcctcagcctctcgagtagctgggatcacagctactgtgcatgccaccacaccgggctaatttttttgtattttttttgtggagacagggcctcactatgttgcgccggctggtctcaaactcctgagctcaagcaatctgcctgcctcggccttccaaagttcctgacagttttgagcaggtggctatgtacttgttttcctagaagtttaaaagtaaggaaatatattcttttcaaaactatttcgatgttcgatgttcaagtattggctatataatgttaaggaaataaagatttttaaaaatgagttcattttgcactttgataagaaagatggattgggtcatttccatccatattaaaatagttggttctggtttttgatttataacttaatttggtttgattcttaacagtacaaacgttaaattatgtgttcattgaacccagttctccatacccacatgtagttttttatcattatatttaaaaggacataatagctccctaagaaagaaactgaaaggagtcaactaacttaacagactgagttgtttaaaataagaaatatgtatatatttttaaaaaatttaattcaaagaacatgtattgaatggctgtcatgcatcagagatatgtgctaagcagcataaatgtaaaatgcagtgttgcattttccatgggaaacaaggaagtacaaatatgttgttctgaggaattttagtcgttcacacgagtctagcgtgagactaaattcaaacagttctggctttgccacttaccagttatgtaaccttggcaaatccttccacatctctgtgtttcagttcccttttcagaagatagggttggaattagtctctctctctctctcaatctacacacacacacacacacacacacacacacacgcacatgcacacacacacacacacataaggttgttgtaggagttaaataagttaatattgataaaatggtaaaa

SEQ ID NO: 287 - DNA, 4023 bp, Homo sapiens
taacctgaattaatgaccataatgactgagtgctgttttgcattaattcttgaaacaaaacctagattgcttcattacatggcctgtctttgtggaagatccttatacggtgtggtggtaaagaaaggggaacatttgctctattttgaagtaattgcttctaatggaagcctaatgacctattatgcttatttctaaaagctgagcagtaagcttgataggaagctagagaaagattggagaaattatgtcatataaaccaaaatttcaggaagttgcatgtggttgagaatcagtacctcattagacaacttaataattcaatagtttacttatgccaaatgtcatccttactttaaaagctggagtgatttctagaaatgtgtccacatccttgcgggttagggtacggggcagcttctggccagctgtcgtccaggtgtcttatggtttttccgagtttcatatgcagatcaaacagggcagtgagagtagagttttcctgtgggtattgaaatggtaacatttaataacctatggtgactttggatattctcaagtttagcttcctgattttttcaagatcaggagacagaagcttaaaagagttaatcctataggattaattagtagtggcaatgaccaaactgcgatgatatggatatattccatttttgggtttcatgggactgtactaccaaagtgtattttatatgtttctaatttggactattgacatcaaatgaatcaaatagttggagtaaatgatttacttgaaggtggttccaaaaattaattaatgaaatgtatctctttagataaaacacatatggtaacatcttaacagctgttgagtctggttgtcagtatatgggtatttattttactcttttttcaattattctgtatgcttgaatatttttatgataaaatgtcttataggtaacaacaaccctattctaataaaagcttgtcagattacttgagcccttgcatactttactgttgagcatcataaaagaacttgaaatgcttttgtttttggattcttcatgtttcaacttcagatggtgacaagtgcaaaatggcttaaaagtgccttggctaggcacagtggctcacacctgtaatcccagcactttgggaggccaaggtggacagatcatgaggtcaggagattgagactatcctggctaacatggtgaaaccttgtctctactgaaagtgcaaaaaattagccggatgtggtggcacatgcctgtagtcccagctactggggaggctgaggcaggagaattgcttgaacctgggaggcgaaggttgcagtgaaccgagattgtaccactgcactccagcctgggcaacagagtgagactgtctcaaaaaaaaaaaaaaaaagtgccttaacttacctggcaataaacatttattgagtctgcagctttcattcatttagctcatttacatttaactgaaacacatttaaaaattcattttttccttttgcaaaagctaggcatgcctactataaaagtttgcaacttttcaaagcatgaaatatgtagagttgataccctcatttattatattttactaattcctgtagagatgagcaacaaaattgtcctttatgaaagctgtcattctctaaaattcgatatagtaggaaagttggtgtgtaaccttatttaacaaggcttgcaactgataacttttgttgagacaggcatgggggcccttcttttggtgttgacataatatctttttgtctttcttattcatcaaggttagtagaaagttgtcaagtttctattcttaagctctagaactatcctggtctttatctatgaaagaagcataaactttgtcaaaggaatgatttactcataataagtcaatgtgaagcccattcataactatacctttttgttttgcttttctcatttctctgagtcattacttaaagctggtgctttataatttgacttaatcacatatggtgtgattcttttagcacacatactgttgtttttaaatcattacattttaaacttctttatatctagaatttttacactgccagataacctgaattttcccctgcttatctggtgaaagaatgataggaattacaatgtttgaaacatagggttgttccttatttactgaaaattatatggaacaacatatatcattctggcttccaaggatgaatctgtgaacgaaaagagtcaaactctgtaatatttgaagagatttattccaagccaaatatgagtgaccatggcccatgacacagccccaggagatcctgataacatgtgcccagggtgatcagggtgtagcatggttttatacattttagggagaaaatagacgtccatcaatacgtgtaagatgtacattggtttggtccaaaaaggcgggacaacttgaagtggcttccatgtcgtaggaggattcaaagattttctgattggcagttggttgaaagagttcatctaaagacctggaatcaatcgaagggagtgtctgggttaagataaggggttgcagagaccaaggttcttattattgcagatgaagcctctagttagcaggcttcagagagaatagattgtaaatgtttcttatcagacataaaaacgtaccagactcttaattaattctctcctggatagggaaaaagacctggaaagggaaggggattctctatggaatgtagattttccccagaagagacagctttgcaggggtatttcaaaatatgtcaaagaaatatattttggggtaaaatacttacatttctttcagggcctgctatctgtcatgttgatatcttgttactagagagagtctgttttgtcaatcataaggtcgctgtattaatgttaatgctagtcagctgtgcctgaattccaaagagaggaagttataatgaggcatgtccaaccacccattcccatcacggcctgaactagtgtttcaggtttactttagaatgcccttggcccagaggagggatccattcagttggttgggggccatagaattttacttttggtttccaaatcagaatgaatattgctagactagaaataactcaaaggttgttggagaattttaaaatgtatttatttatttatgacatctagtttgtgctcttgattaattgctcttgattaacctccctcgtctttaaattaaatcaaaattagcaaatatttattgcggtctaggagaaatctcatttaaggcacaaagcactgtgtaaagcagtagaatgttttctttactaataaaggacagaaattgaagaccaggaattaaccagcccatgtatttcctgatatatacctgatttagtacaggtgtatttggggaaatggggtggttggttagggctggaagaaagtgaggaagagtactcaattaagtagttctcttgatattattttatattgaaaaaatctttaagaggttaaacaaataattaaggtaattaacgaagcagtgagggacacactgggttggaggcgggaggttattattctggacatacctttaactgtgaggagtgaaatggatatgtcaactatgctgaaacttgttttttttaaatctctaagttgattttgtaaggtataaaaaatgttttttagaaaaacctctgaatgtcaaagaagtataatgacagcttgaatatgcatatacagcaaatcacttataattttgtttggcaaatgaaaatagatttcattagctttaaaatagcatttacacttttactcttggatatattaaaaagaaagtgcacattttgtaaaatgtagtagaaaggaaggaagaagaaaataaaacttaccagttaaccatactattcagaagggaatattattaatgtcttactttcatttcactcttcttttctgtgtgtacacaggcatacccccatcttatcacacatagctttactgtgctttccagctgtagcatttttacaaattgaaagtttgtggcaac

SEQ ID NO: 288 - DNA, 4037 bp, Homo sapiens
tgaaactgtaaaattcctagaagaaaacatggggaaaaagtttcctgacattggttaaggcaatgatttttttaatatggccgttcaccagcaaaaataggcaaatgggattgaatcaaactaaaaagcttctgcacagcaaaggcagcaatcaaagtggagagataacctacagaaggggagagaatatttgcaaaccgtacatctgataaggggttaacagccaatatatataagcactcaactcagcaagaaaacaaataaactgatttaaaaattgacaaagtacctgaacagacatttcccaaaagtagatacagaaatgatcatcaggtacaggaaaaaatgcttagcatcactaattacttgggaaatgcaaagcaaaaccacaatgagatattacctcaccccagttagaatggctgttgtcaaaaacatgaaagataactggtgttggagaagatacagagaaaaggaaaagaactcatatattgtgagtgggaatgtaaattagtatagccattatgtaaaatggtatgaaggttcttaaaaaggtaaaaatagaaatacatacaaccaagtaatcccacttctgggtctttatatccaaagaaactgcaatcagtgttaaagggatatttgcactctcacgttcattgtagcattattcacaatagccaagatatggaaacaacaacaaaacatccattaacagatgaatggataaagaaaatgtggtatatctccataatggtatactattcatcctttacaaatggtgtaaatcctgtcatttgtgatagcataaatgagcctggaagtcattatgtaaagagattaaagtcctttgtaaagaatgataaatactgcctgatatcacttatctatggaatctaatacatttgaattaatagaagtagacagtagaactatggttatcagaagcttggtgggtgagggagggagagaaggaaggggaaattgttgatcaaaggctacaaagtttcagatagataagaggatttatggcaaaccaaggagagacatgaatgaaaagagtggctaccaaccaaatcaacaataatgtgttatgtatttcaaaatttctaagagaataaatttgagatgtcttatcaagaaatgacaggtaagcaaggagatgaatcggttaattagtttgattgatcatgccgtgttgtatccatgtatcacattgtatcccataaatgtgtaccactatggtttttcaattacaaaacaaaaacaaaaacactaaatgcatgttgtatgatttcattcatatcacattttagaaaggcaaaattatggttatggaaagcagttcaattgttgacaggggcttgagaattgactacaaagggacatgaaaggactttctagagtgttaaaaatgacctatatgctgattgtggtggtggtcccgctactgtatacatttgccacgactcatcagattgtgtacttaaaattttattttaaattaattatacttcaataaagctgacaagaaacccctccccaaagaaaactgaggaaggaacttataaaaaatagtgatatgattctcttgtattttgtaaaattaaatatatatacacgcattaaaatgtgttctaatgcatgtatgcaaacatatatattttcaaaacactattttattttatcttttcccatactaaaagtactcatcagattgtcattgatttcttctttcctcctctcacctgtgactgtgggaaagaatgattctctcattatgagtcagagccttttttttccttttctgaatttatagtaacgactcaacactagaagtctcagcagcttggtttgcctgtcattaattttaccaatggttgcaggtgtagcctgaaagaataggtataatgctggtatgtaatgctttctcctgcttctaaaaggtgctgtggggaggtgttgaatgagattcatggtggtaaacaagaatataaattcaaatattatcttaaaacagaaacagtaaagcatggagaaaagatccagctgattctagaaagagcaaatgaagaagaaacaagagtgaaaagagtggctaccaaatcataggaaaaaatacaggagtcccaggaccttcccccaaggacagattcctgggaaggtttccagtgagtttttgaacctaaccgctaggttaaatacatccctttagtctcagctcatcttcctaattaagtacaaattcgaaaataattgtaaggttttctcagatatgtgatggattacatgtcagttgcatcacattcttcaagcaaagtaaatgaatgaatgaacaagggaatgaataaacaaaaggagctagatattccctgaacattgcaagcttcctttggcctgtggtgcttccattaccagcagcacttcagttagaatgatccctatgaattaacttgtaaatgaggaggtcaaatgtgcttttgcacagtggtgttaaatatgtggatgaataaattctttcttgtactttgggctatggagtctatgtagggttagaaatataggctttttctaagttgttctcctcttaggaaagttatttacatgataattaaagaagtttagaagcaattcctgaccttaaacaaagataacgtgtagctttcaatatatgaacctttaagaaaccctcaacatttcaaaggcacaaattagagcattagtctaaataacaaacccccctctttcccgatattcatttatagggtataaaatacttgacagaaaagttgagatacagaaaagatgctaaatttcatgaaacattgttatgaatcaattacagacattttagtttatttaaaacagtttgtttgtaactgttcagaaatacttacattgaaagaatgtccacaaagcactagatctgtagtttcagtggagagtcagtattatatattataatattataaaatgacacacttctcaatggcgcagcttcctagaagtcatttcctatattacttggccataatcactattaattcagtttcataaatgattggacatgatcttttaattctgagccttcataaatatgatttcctctgtctgtttagactgttttctttaggagtccacttgtctaacttcagttgccatctcaggcattacttctcctgggaagcctatctcactgcctttccctttagacacctggactaggagtttctctgtgctcatatgataccctttaggactttttcattcagttagtttctgaatcctttagctcaaaccagaacactctaagtcacgcttgattgctcattttttcacctaccctatgtattcctatttgttgtacctcagctagcacattggtctctgcctccaaagtatattcttaatcatctgtctctcttcattttcatggttaatccatcaaagccatgccattttatccagacaaatggagtagccatctaagtgttgtttttgcttctagtatttgaagcaaatacataacataagttatggaagcaaatacataacatgacataaaccaagtcatgtcagttctctgcttgaaacaacccaaaggctcccattacacttataataaaatctaaaccccttacgctgccctaccaggtcctacatgatcaggcagggccatttgtctctctgacattttaaaaatttttaaccatcactcctgtcccctggcccactgtatttggctcttttctcttccttgtacataccaagccttcctaccacaggacctttgcactagtgtctcattatcttgaaacagttttcactgatctccatgttgtaactccttctcggcagtagcattggaccctaaggatgtacaatgttttatactgtgtttaattcagttactctgaattagataagcagtgggccttaacagcatacaggtgaaatcttgaataatttaacaagtattgattctgaactattgttaaataattcacacagttaattataattaccattattgcttaaga

SEQ ID NO: 289 - DNA, 4049 bp, Homo sapiens
atttcatgaaacattgttatgaatcaattacagacattttagtttatttaaaacagtttgtttgtaactgttcagaaatacttacattgaaagaatgtccacaaagcactagatctgtagtttcagtggagagtcagtattatatattataatattataaaatgacacacttctcaatggcgcagcttcctagaagtcatttcctatattacttggccataatcactattaattcagtttcataaatgattggacatgatcttttaattctgagccttcataaatatgatttcctctgtctgtttagactgttttctttaggagtccacttgtctaacttcagttgccatctcaggcattacttctcctgggaagcctatctcactgcctttccctttagacacctggactaggagtttctctgtgctcatatgataccctttaggactttttcattcagttagtttctgaatcctttagctcaaaccagaacactctaagtcacgcttgattgctcattttttcacctaccctatgtattcctatttgttgtacctcagctagcacattggtctctgcctccaaagtatattcttaatcatctgtctctcttcattttcatggttaatccatcaaagccatgccattttatccagacaaatggagtagccatctaagtgttgtttttgcttctagtatttgaagcaaatacataacataagttatggaagcaaatacataacatgacataaaccaagtcatgtcagttctctgcttgaaacaacccaaaggctcccattacacttataataaaatctaaaccccttacgctgccctaccaggtcctacatgatcaggcagggccatttgtctctctgacattttaaaaatttttaaccatcactcctgtcccctggcccactgtatttggctcttttctcttccttgtacataccaagccttcctaccacaggacctttgcactagtgtctcattatcttgaaacagttttcactgatctccatgttgtaactccttctcggcagtagcattggaccctaaggatgtacaatgttttatactgtgtttaattcagttactctgaattagataagcagtgggccttaacagcatacaggtgaaatcttgaataatttaacaagtattgattctgaactattgttaaataattcacacagttaattataattaccattattgcttaagaactacttaataaagcagggtttgtggctagaatttaaagacaatttgttggatacctttaatctatagaaatgtataataaagatgagagaaataactgttagcgaatcctttggattaagctacaagccattataatttgcagtagcaagccttgtaatgctaatgacaaatataagtcagtttgtttcctatgcactcatggatcagtggttacttcggaaatttgtgttttgtctgatagttttttttttttttgaaaagcccttttttaaaaaagattttaaaaataaaggtgaatttcacacaatctaaaattaaccaaagtgaacatctttggtagccttttactttgatttttatgtatattattatagttatttaatagcctctaaaaatacccagaatggcttaccacttccttttcaagaaaagaattctttagtctccccaaatcttatgcccactggctcattgtacagtctctctgaattctatgccagttccgctcttataaattgtgagcctgtgtttcttgtgccaggttctattccaggcgcaggtgggcatcagtgcagccagcccgccatagcgttctaccacctggtgtagaaatctgttaggaatacgggaagactatttgtggcctttattgactatcctttgcctttgaatccgtgagcagaaatctattattgaataaagtcccatgaattcaattcaaaccctgcattattgattttcaagcagaacttgtgccataatactgttatactgtagttggttacattcagggtcaatagaaatgatttcttgagatatcagtggataattttcattgggattagtcaggaatgtgttctgtcttccatctgtctgcacattgtgagttcttaatgatttgatgcctcttttggctgaattatatccaccataccatcactctggtgagcaaaaagagaagcattctgtattatacaaatgatatgtttagaaacataactaagaatgtttttaatcacccactggcctacccatccaatccctgctatcaattaactattctgaaaccatcatcatgatttcacatgatatttcctctatttaaagtagtgtaactgtaagtcacctcaatttggtatccaggtttgcgtttggcaataaattcctcttggcagcttcagcaagttatatttcttaatactggatctgctgaggttatgtttatggagaccagaactatgagtattgatttatgtttgctttgaacatcttccagtctaaagtcattgtggctatgctttgttgatgaactgcaggagattgcccttgggattgcattgagtgaacttggcccctgtacttcttcagatcatttcaggagagttgaggtggacttctctttaggaaggtgttcttttttttcagctcttcgtaaatgtccatcagtcttgctctgcatagccaagctgttgaagcatgatcaccttgcattgaataagctgcacagagctactgttctaccggggagtatgcttgcaggggagcataatctcaaatttactgctacccactcggtaccatgcagagcttgcttgggagttcagggaggattgtttgaaatgggcagttcaactattcttccagataatcaaaaaagccatccctcgatttagcagaacattgagaaatcctttcctttgactgtattgtattgtttctctaaaagcttgctttgattaaattgcacctgggtgtttaaaaagagaatacatgtgagtgttaatgcacttacattgtaattcagatggatcttttttgcaaactaaattaaaaggtacagagaccattcagagaagccatctgtcactatttgaaagttataattagggtcataatttttaatgtcattgtcatacattggaaaatggaagctttgggatatccactggaggttttacctctcctctacaatgccacactaaatttggaaatttattcagctgaaattttttcaagtttaaatattatatttactttttattgatgatactactaagtacagtgcttccttgagtgtattccttaataaatatttcttcaatttgtttgaatattttgccacaaaccagtctttagcttgacatttgaatttaatcttccatgtattaactaggcatgtacaaaacacatgcttatttattaggcatgcactaactgtactttggttacaggctaaaagactttagagttggttttcaaaatctatttgcttcaaagaatcttagtagtcagtagttaaccaagaaactttaaaaaaatgagccccattttaattttatttacccatctagctattcatttatttgacagatatttatttttgtgcctactatgtacttggcacaatgataaccttttcccagttcttttactctgttattattgtttaaagtttggaaattaaaatactctatattatatgctatattagttaaagctaagcatggtgctgtatcattaaacacaacaataacagccaaataaagttagaacacaccaaatatgttttatttacatgcaaatatttaaaatgatatatttaggtatagtatttaacaacttttatgttcctcacatcagaatttatattctttcaacaagagcctttttaaagataaggattaaattgaccatgcataactttgatgtgattaagctatttgatcttttaaatagaatcattcgattttgctgacacttagcaatagcccattattttagatataatttctttgtgatcatagtaagtttagagtcat

SEQ ID NO: 290 - DNA, 4043 bp, Homo sapiens
ttaaatattatatttactttttattgatgatactactaagtacagtgcttccttgagtgtattccttaataaatatttcttcaatttgtttgaatattttgccacaaaccagtctttagcttgacatttgaatttaatcttccatgtattaactaggcatgtacaaaacacatgcttatttattaggcatgcactaactgtactttggttacaggctaaaagactttagagttggttttcaaaatctatttgcttcaaagaatcttagtagtcagtagttaaccaagaaactttaaaaaaatgagccccattttaattttatttacccatctagctattcatttatttgacagatatttatttttgtgcctactatgtacttggcacaatgataaccttttcccagttcttttactctgttattattgtttaaagtttggaaattaaaatactctatattatatgctatattagttaaagctaagcatggtgctgtatcattaaacacaacaataacagccaaataaagttagaacacaccaaatatgttttatttacatgcaaatatttaaaatgatatatttaggtatagtatttaacaacttttatgttcctcacatcagaatttatattctttcaacaagagcctttttaaagataaggattaaattgaccatgcataactttgatgtgattaagctatttgatcttttaaatagaatcattcgattttgctgacacttagcaatagcccattattttagatataatttctttgtgatcatagtaagtttagagtcatagatgactccctcgaggtcttagtagcatattatgaatttggtatctatgtgattaaataagcacaacaaaattcatatcaaattggtcgataaacacatttttaatattgtgccagactatcattattaatttttaaatcaatatgtagtagtatgaccacaatgtcatattcattagtaaagtacagctgttttttatgccatcaggattatttggcatttaagcagtgccttctactttaaatgatgccattatcctttgaggactctgcctatcaatttggtcagtctagaaatgcaactcattatagaatgaagctgaatagttactgaagcagaatacaactttacaacctcttaaaccagaatatgggagaagcccaatttacctttaaaacttttgggtgtctacacagaaaaaggtgttaatgtgccttgtgaaatttctcaatggtgaatacattttttattctatgtgatttatttctggagatgtacattaatctttgtgaagttgctgtggaatttggttgggtttgtcaaaatgtgtcaaaaatgtgaaatatcccagttctactaattttctaacacaaagttagatggacaaagttagatgacaaagaagaagacaaagttagatggactccataggagagaagaggacttaaaaatgatgccttaatatctgcccccattttgaaagtgaaattttgcggataatgtttctattgcagttgagttagaaataaggaagcattttaaaaccaggtggatgattcaacactagaccacccaggaagggcattccttctgtaataggaaaggtctttaaacctggagtaccacatcacatgtaatgtgtaagtgtggatatttctggagctctcccagatatccagtgtgtctgcatgaatgtgtctctctttatcttttttgttaaggatgcaaatggagagttatatattggattcctcttgcatcactttagatgccttctgtttatattgagcctggcttatttggagttagcttgtaaatttaatgagatcattgtgatggccatgattgcagaatggaaaatgtcactactatgtgccagtttgcttaaatcatttttaagtacccacctgtgctgctaaactctccatttgcattttattggctactatgtttttgctccagagcgggttcctttaactctgatgcctgggtaaattaatcggggtgtgcatgccattgcccttttagcttctgctcctgttctaataaaggctccatctgcttaattggtagacttacaggcctttcttatttcaaaaaatcactttgaaaaaaagcatagcttctcaagggaaagaagaaccagaactcttgaaaaatgtattatttgggagatgttaaatttctgccatcactgtgctgagatgtatgtagtcaatgagaaacagcatccaagataatactggttttcttactactttttttccatctcttgtacatctctatgtctgtatttcatgaaaacctaccttctctaataaaggtgtggtgagctggggacaagacaactctggggatttacctgttatagacaaactctttactttttttctttttgatctggctgccttcttggtgatattactatgagaatgaggagggaattaaggattattgtaaagtgaaatagcagctttgaggtctgaaacactgagggagaagaaggaaaagaagagacatggtaaggattctaaggaggcctgaagatatctgggattcccattctttttgtccacagcatacttaggttggtcaggtgtaagtgaggagagcttgcatagtaagagcagctccagtgtggtattagtagggttaatgattgagtgtgtgatttacagtattggatctaagggtatcatgaagtcagactgtaaccttggacaaactagttaacctctttgggccccagtctctccatctacaaaatgagagtaattaatggtggtattacctcttagggttgttgtcaagattaaatgagctattacaggtaaagtgcttagaaaaacgcctatttgtaatattcatttttactaataactgttattaggagtgggaatagcaatttcagtgagttataaaacattgattatgaaccattttagagaacgatagttgttttattgctaatgtgaacaaaccatactgtatatgaaactttttatggttctccagagaaaccatgtatttttttctgactttgtacctatccttttgcttggatgcctttcttctagaaagttttactgatccttcagggcccatatcaaatgtatcttatcagtgaattgtctctcatccctttcagacagaatgagtttacgccctatcttgggctcccatagcacttatctcgctatgatgcaattctcttctcagatttgtatattctctccttgatggcaatgcagagtcttctcatagtgttaataataacatatgtagcctgtgtatgtgaaacaggtggatgttgctgatacttaattaggaaaggtatagtgattctcatcgtgttcacaagtcagactctccttatacctcaatcactgccgtatcttttaccttgcatatgagacccccagtataagagtgtaataactatctgattcatttgctagtaatgctgaagggaattgttaagctgatctgtttggtttatggaaaagatgtttattcttcctacgccttctcttttttctcctttgcctcctccttttgtccttttccacctcctcttcctccttgtcctcctttttcttccttctctctccctcttctcctttttttggttataattagtttatttaaagctcttgcttatttttgctcatccttaatataaatagatcttcattgtattcgtgacatgttttatcacattcttcatgaaattttaataaacagttgaatattttctattatttatacatatgtgtaatattactcttctcaaatataccattgaatgagtgttttatcttacaatagatggtatccatttttttttgttgtttttttttttttttttttttggagacggagtcttgctgtgtcgtccaggctggagtacacgatcttggctcactgccacctccgcctcccaggttcatgcaattaattctcctgcctcagccacccaagtagctgggattacaggcatatgccaccatacctggctaa

SEQ ID NO: 291 - DNA, 4045 bp, Homo sapiens
aaaccagtctttagcttgacatttgaatttaatcttccatgtattaactaggcatgtacaaaacacatgcttatttattaggcatgcactaactgtactttggttacaggctaaaagactttagagttggttttcaaaatctatttgcttcaaagaatcttagtagtcagtagttaaccaagaaactttaaaaaaatgagccccattttaattttatttacccatctagctattcatttatttgacagatatttatttttgtgcctactatgtacttggcacaatgataaccttttcccagttcttttactctgttattattgtttaaagtttggaaattaaaatactctatattatatgctatattagttaaagctaagcatggtgctgtatcattaaacacaacaataacagccaaataaagttagaacacaccaaatatgttttatttacatgcaaatatttaaaatgatatatttaggtatagtatttaacaacttttatgttcctcacatcagaatttatattctttcaacaagagcctttttaaagataaggattaaattgaccatgcataactttgatgtgattaagctatttgatcttttaaatagaatcattcgattttgctgacacttagcaatagcccattattttagatataatttctttgtgatcatagtaagtttagagtcatagatgactccctcgaggtcttagtagcatattatgaatttggtatctatgtgattaaataagcacaacaaaattcatatcaaattggtcgataaacacatttttaatattgtgccagactatcattattaatttttaaatcaatatgtagtagtatgaccacaatgtcatattcattagtaaagtacagctgttttttatgccatcaggattatttggcatttaagcagtgccttctactttaaatgatgccattatcctttgaggactctgcctatcaatttggtcagtctagaaatgcaactcattatagaatgaagctgaatagttactgaagcagaatacaactttacaacctcttaaaccagaatatgggagaagcccaatttacctttaaaacttttgggtgtctacacagaaaaaggtgttaatgtgccttgtgaaatttctcaatggtgaatacattttttattctatgtgatttatttctggagatgtacattaatctttgtgaagttgctgtggaatttggttgggtttgtcaaaatgtgtcaaaaatgtgaaatatcccagttctactaattttctaacacaaagttagatggacaaagttagatgacaaagaagaagacaaagttagatggactccataggagagaagaggacttaaaaatgatgccttaatatctgcccccattttgaaagtgaaattttgcggataatgtttctattgcagttgagttagaaataaggaagcattttaaaaccaggtggatgattcaacactagaccacccaggaagggcattccttctgtaataggaaaggtctttaaacctggagtaccacatcacatgtaatgtgtaagtgtggatatttctggagctctcccagatatccagtgtgtctgcatgaatgtgtctctctttatcttttttgttaaggatgcaaatggagagttatatattggattcctcttgcatcactttagatgccttctgtttatattgagcctggcttatttggagttagcttgtaaatttaatgagatcattgtgatggccatgattgcagaatggaaaatgtcactactatgtgccagtttgcttaaatcatttttaagtacccacctgtgctgctaaactctccatttgcattttattggctactatgtttttgctccagagcgggttcctttaactctgatgcctgggtaaattaatcggggtgtgcatgccattgcccttttagcttctgctcctgttctaataaaggctccatctgcttaattggtagacttacaggcctttcttatttcaaaaaatcactttgaaaaaaagcatagcttctcaagggaaagaagaaccagaactcttgaaaaatgtattatttgggagatgttaaatttctgccatcactgtgctgagatgtatgtagtcaatgagaaacagcatccaagataatactggttttcttactactttttttccatctcttgtacatctctatgtctgtatttcatgaaaacctaccttctctaataaaggtgtggtgagctggggacaagacaactctggggatttacctgttatagacaaactctttactttttttctttttgatctggctgccttcttggtgatattactatgagaatgaggagggaattaaggattattgtaaagtgaaatagcagctttgaggtctgaaacactgagggagaagaaggaaaagaagagacatggtaaggattctaaggaggcctgaagatatctgggattcccattctttttgtccacagcatacttaggttggtcaggtgtaagtgaggagagcttgcatagtaagagcagctccagtgtggtattagtagggttaatgattgagtgtgtgatttacagtattggatctaagggtatcatgaagtcagactgtaaccttggacaaactagttaacctctttgggccccagtctctccatctacaaaatgagagtaattaatggtggtattacctcttagggttgttgtcaagattaaatgagctattacaggtaaagtgcttagaaaaacgcctatttgtaatattcatttttactaataactgttattaggagtgggaatagcaatttcagtgagttataaaacattgattatgaaccattttagagaacgatagttgttttattgctaatgtgaacaaaccatactgtatatgaaactttttatggttctccagagaaaccatgtatttttttctgactttgtacctatccttttgcttggatgcctttcttctagaaagttttactgatccttcagggcccatatcaaatgtatcttatcagtgaattgtctctcatccctttcagacagaatgagtttacgccctatcttgggctcccatagcacttatctcgctatgatgcaattctcttctcagatttgtatattctctccttgatggcaatgcagagtcttctcatagtgttaataataacatatgtagcctgtgtatgtgaaacaggtggatgttgctgatacttaattaggaaaggtatagtgattctcatcgtgttcacaagtcagactctccttatacctcaatcactgccgtatcttttaccttgcatatgagacccccagtataagagtgtaataactatctgattcatttgctagtaatgctgaagggaattgttaagctgatctgtttggtttatggaaaagatgtttattcttcctacgccttctcttttttctcctttgcctcctccttttgtccttttccacctcctcttcctccttgtcctcctttttcttccttctctctccctcttctcctttttttggttataattagtttatttaaagctcttgcttatttttgctcatccttaatataaatagatcttcattgtattcgtgacatgttttatcacattcttcatgaaattttaataaacagttgaatattttctattatttatacatatgtgtaatattactcttctcaaatataccattgaatgagtgttttatcttacaatagatggtatccatttttttttgttgtttttttttttttttttttttggagacggagtcttgctgtgtcgtccaggctggagtacacgatcttggctcactgccacctccgcctcccaggttcatgcaattaattctcctgcctcagccacccaagtagctgggattacaggcatatgccaccatacctggctaatttttgtatttttattagagatggggttttaccatgttggccaggctggtatctaactcctgaccgcaagtgatctgcctgccttggcctcctgaagtgctgggatt

SEQ ID NO: 292 - DNA, 4048 bp, Homo sapiens
tcaaagaatcttagtagtcagtagttaaccaagaaactttaaaaaaatgagccccattttaattttatttacccatctagctattcatttatttgacagatatttatttttgtgcctactatgtacttggcacaatgataaccttttcccagttcttttactctgttattattgtttaaagtttggaaattaaaatactctatattatatgctatattagttaaagctaagcatggtgctgtatcattaaacacaacaataacagccaaataaagttagaacacaccaaatatgttttatttacatgcaaatatttaaaatgatatatttaggtatagtatttaacaacttttatgttcctcacatcagaatttatattctttcaacaagagcctttttaaagataaggattaaattgaccatgcataactttgatgtgattaagctatttgatcttttaaatagaatcattcgattttgctgacacttagcaatagcccattattttagatataatttctttgtgatcatagtaagtttagagtcatagatgactccctcgaggtcttagtagcatattatgaatttggtatctatgtgattaaataagcacaacaaaattcatatcaaattggtcgataaacacatttttaatattgtgccagactatcattattaatttttaaatcaatatgtagtagtatgaccacaatgtcatattcattagtaaagtacagctgttttttatgccatcaggattatttggcatttaagcagtgccttctactttaaatgatgccattatcctttgaggactctgcctatcaatttggtcagtctagaaatgcaactcattatagaatgaagctgaatagttactgaagcagaatacaactttacaacctcttaaaccagaatatgggagaagcccaatttacctttaaaacttttgggtgtctacacagaaaaaggtgttaatgtgccttgtgaaatttctcaatggtgaatacattttttattctatgtgatttatttctggagatgtacattaatctttgtgaagttgctgtggaatttggttgggtttgtcaaaatgtgtcaaaaatgtgaaatatcccagttctactaattttctaacacaaagttagatggacaaagttagatgacaaagaagaagacaaagttagatggactccataggagagaagaggacttaaaaatgatgccttaatatctgcccccattttgaaagtgaaattttgcggataatgtttctattgcagttgagttagaaataaggaagcattttaaaaccaggtggatgattcaacactagaccacccaggaagggcattccttctgtaataggaaaggtctttaaacctggagtaccacatcacatgtaatgtgtaagtgtggatatttctggagctctcccagatatccagtgtgtctgcatgaatgtgtctctctttatcttttttgttaaggatgcaaatggagagttatatattggattcctcttgcatcactttagatgccttctgtttatattgagcctggcttatttggagttagcttgtaaatttaatgagatcattgtgatggccatgattgcagaatggaaaatgtcactactatgtgccagtttgcttaaatcatttttaagtacccacctgtgctgctaaactctccatttgcattttattggctactatgtttttgctccagagcgggttcctttaactctgatgcctgggtaaattaatcggggtgtgcatgccattgcccttttagcttctgctcctgttctaataaaggctccatctgcttaattggtagacttacaggcctttcttatttcaaaaaatcactttgaaaaaaagcatagcttctcaagggaaagaagaaccagaactcttgaaaaatgtattatttgggagatgttaaatttctgccatcactgtgctgagatgtatgtagtcaatgagaaacagcatccaagataatactggttttcttactactttttttccatctcttgtacatctctatgtctgtatttcatgaaaacctaccttctctaataaaggtgtggtgagctggggacaagacaactctggggatttacctgttatagacaaactctttactttttttctttttgatctggctgccttcttggtgatattactatgagaatgaggagggaattaaggattattgtaaagtgaaatagcagctttgaggtctgaaacactgagggagaagaaggaaaagaagagacatggtaaggattctaaggaggcctgaagatatctgggattcccattctttttgtccacagcatacttaggttggtcaggtgtaagtgaggagagcttgcatagtaagagcagctccagtgtggtattagtagggttaatgattgagtgtgtgatttacagtattggatctaagggtatcatgaagtcagactgtaaccttggacaaactagttaacctctttgggccccagtctctccatctacaaaatgagagtaattaatggtggtattacctcttagggttgttgtcaagattaaatgagctattacaggtaaagtgcttagaaaaacgcctatttgtaatattcatttttactaataactgttattaggagtgggaatagcaatttcagtgagttataaaacattgattatgaaccattttagagaacgatagttgttttattgctaatgtgaacaaaccatactgtatatgaaactttttatggttctccagagaaaccatgtatttttttctgactttgtacctatccttttgcttggatgcctttcttctagaaagttttactgatccttcagggcccatatcaaatgtatcttatcagtgaattgtctctcatccctttcagacagaatgagtttacgccctatcttgggctcccatagcacttatctcgctatgatgcaattctcttctcagatttgtatattctctccttgatggcaatgcagagtcttctcatagtgttaataataacatatgtagcctgtgtatgtgaaacaggtggatgttgctgatacttaattaggaaaggtatagtgattctcatcgtgttcacaagtcagactctccttatacctcaatcactgccgtatcttttaccttgcatatgagacccccagtataagagtgtaataactatctgattcatttgctagtaatgctgaagggaattgttaagctgatctgtttggtttatggaaaagatgtttattcttcctacgccttctcttttttctcctttgcctcctccttttgtccttttccacctcctcttcctccttgtcctcctttttcttccttctctctccctcttctcctttttttggttataattagtttatttaaagctcttgcttatttttgctcatccttaatataaatagatcttcattgtattcgtgacatgttttatcacattcttcatgaaattttaataaacagttgaatattttctattatttatacatatgtgtaatattactcttctcaaatataccattgaatgagtgttttatcttacaatagatggtatccatttttttttgttgtttttttttttttttttttttggagacggagtcttgctgtgtcgtccaggctggagtacacgatcttggctcactgccacctccgcctcccaggttcatgcaattaattctcctgcctcagccacccaagtagctgggattacaggcatatgccaccatacctggctaatttttgtatttttattagagatggggttttaccatgttggccaggctggtatctaactcctgaccgcaagtgatctgcctgccttggcctcctgaagtgctgggattacaggtgtgagccactgtgccaggctggatggtatcttctaatcaagaaaagatataagtatttttatgacatcaaatttaagaataatagccagttatatatttgtgggatcatgtgataagaaaaatatattggtttactattttagatg

SEQ ID NO: 293 - DNA, 4056 bp, Homo sapiens
tttactctgttattattgtttaaagtttggaaattaaaatactctatattatatgctatattagttaaagctaagcatggtgctgtatcattaaacacaacaataacagccaaataaagttagaacacaccaaatatgttttatttacatgcaaatatttaaaatgatatatttaggtatagtatttaacaacttttatgttcctcacatcagaatttatattctttcaacaagagcctttttaaagataaggattaaattgaccatgcataactttgatgtgattaagctatttgatcttttaaatagaatcattcgattttgctgacacttagcaatagcccattattttagatataatttctttgtgatcatagtaagtttagagtcatagatgactccctcgaggtcttagtagcatattatgaatttggtatctatgtgattaaataagcacaacaaaattcatatcaaattggtcgataaacacatttttaatattgtgccagactatcattattaatttttaaatcaatatgtagtagtatgaccacaatgtcatattcattagtaaagtacagctgttttttatgccatcaggattatttggcatttaagcagtgccttctactttaaatgatgccattatcctttgaggactctgcctatcaatttggtcagtctagaaatgcaactcattatagaatgaagctgaatagttactgaagcagaatacaactttacaacctcttaaaccagaatatgggagaagcccaatttacctttaaaacttttgggtgtctacacagaaaaaggtgttaatgtgccttgtgaaatttctcaatggtgaatacattttttattctatgtgatttatttctggagatgtacattaatctttgtgaagttgctgtggaatttggttgggtttgtcaaaatgtgtcaaaaatgtgaaatatcccagttctactaattttctaacacaaagttagatggacaaagttagatgacaaagaagaagacaaagttagatggactccataggagagaagaggacttaaaaatgatgccttaatatctgcccccattttgaaagtgaaattttgcggataatgtttctattgcagttgagttagaaataaggaagcattttaaaaccaggtggatgattcaacactagaccacccaggaagggcattccttctgtaataggaaaggtctttaaacctggagtaccacatcacatgtaatgtgtaagtgtggatatttctggagctctcccagatatccagtgtgtctgcatgaatgtgtctctctttatcttttttgttaaggatgcaaatggagagttatatattggattcctcttgcatcactttagatgccttctgtttatattgagcctggcttatttggagttagcttgtaaatttaatgagatcattgtgatggccatgattgcagaatggaaaatgtcactactatgtgccagtttgcttaaatcatttttaagtacccacctgtgctgctaaactctccatttgcattttattggctactatgtttttgctccagagcgggttcctttaactctgatgcctgggtaaattaatcggggtgtgcatgccattgcccttttagcttctgctcctgttctaataaaggctccatctgcttaattggtagacttacaggcctttcttatttcaaaaaatcactttgaaaaaaagcatagcttctcaagggaaagaagaaccagaactcttgaaaaatgtattatttgggagatgttaaatttctgccatcactgtgctgagatgtatgtagtcaatgagaaacagcatccaagataatactggttttcttactactttttttccatctcttgtacatctctatgtctgtatttcatgaaaacctaccttctctaataaaggtgtggtgagctggggacaagacaactctggggatttacctgttatagacaaactctttactttttttctttttgatctggctgccttcttggtgatattactatgagaatgaggagggaattaaggattattgtaaagtgaaatagcagctttgaggtctgaaacactgagggagaagaaggaaaagaagagacatggtaaggattctaaggaggcctgaagatatctgggattcccattctttttgtccacagcatacttaggttggtcaggtgtaagtgaggagagcttgcatagtaagagcagctccagtgtggtattagtagggttaatgattgagtgtgtgatttacagtattggatctaagggtatcatgaagtcagactgtaaccttggacaaactagttaacctctttgggccccagtctctccatctacaaaatgagagtaattaatggtggtattacctcttagggttgttgtcaagattaaatgagctattacaggtaaagtgcttagaaaaacgcctatttgtaatattcatttttactaataactgttattaggagtgggaatagcaatttcagtgagttataaaacattgattatgaaccattttagagaacgatagttgttttattgctaatgtgaacaaaccatactgtatatgaaactttttatggttctccagagaaaccatgtatttttttctgactttgtacctatccttttgcttggatgcctttcttctagaaagttttactgatccttcagggcccatatcaaatgtatcttatcagtgaattgtctctcatccctttcagacagaatgagtttacgccctatcttgggctcccatagcacttatctcgctatgatgcaattctcttctcagatttgtatattctctccttgatggcaatgcagagtcttctcatagtgttaataataacatatgtagcctgtgtatgtgaaacaggtggatgttgctgatacttaattaggaaaggtatagtgattctcatcgtgttcacaagtcagactctccttatacctcaatcactgccgtatcttttaccttgcatatgagacccccagtataagagtgtaataactatctgattcatttgctagtaatgctgaagggaattgttaagctgatctgtttggtttatggaaaagatgtttattcttcctacgccttctcttttttctcctttgcctcctccttttgtccttttccacctcctcttcctccttgtcctcctttttcttccttctctctccctcttctcctttttttggttataattagtttatttaaagctcttgcttatttttgctcatccttaatataaatagatcttcattgtattcgtgacatgttttatcacattcttcatgaaattttaataaacagttgaatattttctattatttatacatatgtgtaatattactcttctcaaatataccattgaatgagtgttttatcttacaatagatggtatccatttttttttgttgtttttttttttttttttttttggagacggagtcttgctgtgtcgtccaggctggagtacacgatcttggctcactgccacctccgcctcccaggttcatgcaattaattctcctgcctcagccacccaagtagctgggattacaggcatatgccaccatacctggctaatttttgtatttttattagagatggggttttaccatgttggccaggctggtatctaactcctgaccgcaagtgatctgcctgccttggcctcctgaagtgctgggattacaggtgtgagccactgtgccaggctggatggtatcttctaatcaagaaaagatataagtatttttatgacatcaaatttaagaataatagccagttatatatttgtgggatcatgtgataagaaaaatatattggtttactattttagatggaataataatgtgtcttttctgatatctttacaagaatgttagaaatcatctgtattgtaatgttgttttaccttatccaaggggaaataaagcatgaacatttataggcttttatttataaatggacttttaaaatatgttttctcacaaagaggaaatttag

SEQ ID NO: 294 - DNA, 4076 bp, Homo sapiens
tatattagttaaagctaagcatggtgctgtatcattaaacacaacaataacagccaaataaagttagaacacaccaaatatgttttatttacatgcaaatatttaaaatgatatatttaggtatagtatttaacaacttttatgttcctcacatcagaatttatattctttcaacaagagcctttttaaagataaggattaaattgaccatgcataactttgatgtgattaagctatttgatcttttaaatagaatcattcgattttgctgacacttagcaatagcccattattttagatataatttctttgtgatcatagtaagtttagagtcatagatgactccctcgaggtcttagtagcatattatgaatttggtatctatgtgattaaataagcacaacaaaattcatatcaaattggtcgataaacacatttttaatattgtgccagactatcattattaatttttaaatcaatatgtagtagtatgaccacaatgtcatattcattagtaaagtacagctgttttttatgccatcaggattatttggcatttaagcagtgccttctactttaaatgatgccattatcctttgaggactctgcctatcaatttggtcagtctagaaatgcaactcattatagaatgaagctgaatagttactgaagcagaatacaactttacaacctcttaaaccagaatatgggagaagcccaatttacctttaaaacttttgggtgtctacacagaaaaaggtgttaatgtgccttgtgaaatttctcaatggtgaatacattttttattctatgtgatttatttctggagatgtacattaatctttgtgaagttgctgtggaatttggttgggtttgtcaaaatgtgtcaaaaatgtgaaatatcccagttctactaattttctaacacaaagttagatggacaaagttagatgacaaagaagaagacaaagttagatggactccataggagagaagaggacttaaaaatgatgccttaatatctgcccccattttgaaagtgaaattttgcggataatgtttctattgcagttgagttagaaataaggaagcattttaaaaccaggtggatgattcaacactagaccacccaggaagggcattccttctgtaataggaaaggtctttaaacctggagtaccacatcacatgtaatgtgtaagtgtggatatttctggagctctcccagatatccagtgtgtctgcatgaatgtgtctctctttatcttttttgttaaggatgcaaatggagagttatatattggattcctcttgcatcactttagatgccttctgtttatattgagcctggcttatttggagttagcttgtaaatttaatgagatcattgtgatggccatgattgcagaatggaaaatgtcactactatgtgccagtttgcttaaatcatttttaagtacccacctgtgctgctaaactctccatttgcattttattggctactatgtttttgctccagagcgggttcctttaactctgatgcctgggtaaattaatcggggtgtgcatgccattgcccttttagcttctgctcctgttctaataaaggctccatctgcttaattggtagacttacaggcctttcttatttcaaaaaatcactttgaaaaaaagcatagcttctcaagggaaagaagaaccagaactcttgaaaaatgtattatttgggagatgttaaatttctgccatcactgtgctgagatgtatgtagtcaatgagaaacagcatccaagataatactggttttcttactactttttttccatctcttgtacatctctatgtctgtatttcatgaaaacctaccttctctaataaaggtgtggtgagctggggacaagacaactctggggatttacctgttatagacaaactctttactttttttctttttgatctggctgccttcttggtgatattactatgagaatgaggagggaattaaggattattgtaaagtgaaatagcagctttgaggtctgaaacactgagggagaagaaggaaaagaagagacatggtaaggattctaaggaggcctgaagatatctgggattcccattctttttgtccacagcatacttaggttggtcaggtgtaagtgaggagagcttgcatagtaagagcagctccagtgtggtattagtagggttaatgattgagtgtgtgatttacagtattggatctaagggtatcatgaagtcagactgtaaccttggacaaactagttaacctctttgggccccagtctctccatctacaaaatgagagtaattaatggtggtattacctcttagggttgttgtcaagattaaatgagctattacaggtaaagtgcttagaaaaacgcctatttgtaatattcatttttactaataactgttattaggagtgggaatagcaatttcagtgagttataaaacattgattatgaaccattttagagaacgatagttgttttattgctaatgtgaacaaaccatactgtatatgaaactttttatggttctccagagaaaccatgtatttttttctgactttgtacctatccttttgcttggatgcctttcttctagaaagttttactgatccttcagggcccatatcaaatgtatcttatcagtgaattgtctctcatccctttcagacagaatgagtttacgccctatcttgggctcccatagcacttatctcgctatgatgcaattctcttctcagatttgtatattctctccttgatggcaatgcagagtcttctcatagtgttaataataacatatgtagcctgtgtatgtgaaacaggtggatgttgctgatacttaattaggaaaggtatagtgattctcatcgtgttcacaagtcagactctccttatacctcaatcactgccgtatcttttaccttgcatatgagacccccagtataagagtgtaataactatctgattcatttgctagtaatgctgaagggaattgttaagctgatctgtttggtttatggaaaagatgtttattcttcctacgccttctcttttttctcctttgcctcctccttttgtccttttccacctcctcttcctccttgtcctcctttttcttccttctctctccctcttctcctttttttggttataattagtttatttaaagctcttgcttatttttgctcatccttaatataaatagatcttcattgtattcgtgacatgttttatcacattcttcatgaaattttaataaacagttgaatattttctattatttatacatatgtgtaatattactcttctcaaatataccattgaatgagtgttttatcttacaatagatggtatccatttttttttgttgtttttttttttttttttttttggagacggagtcttgctgtgtcgtccaggctggagtacacgatcttggctcactgccacctccgcctcccaggttcatgcaattaattctcctgcctcagccacccaagtagctgggattacaggcatatgccaccatacctggctaatttttgtatttttattagagatggggttttaccatgttggccaggctggtatctaactcctgaccgcaagtgatctgcctgccttggcctcctgaagtgctgggattacaggtgtgagccactgtgccaggctggatggtatcttctaatcaagaaaagatataagtatttttatgacatcaaatttaagaataatagccagttatatatttgtgggatcatgtgataagaaaaatatattggtttactattttagatggaataataatgtgtcttttctgatatctttacaagaatgttagaaatcatctgtattgtaatgttgttttaccttatccaaggggaaataaagcatgaacatttataggcttttatttataaatggacttttaaaatatgttttctcacaaagaggaaatttagctctagaaaacaggaaaggattgtaggaactcccatctgcattggaaagtgactgtcactctcgtattggacaatg

SEQ ID NO: 295 - DNA, 4056 bp, Homo sapiens
tttcaacaagagcctttttaaagataaggattaaattgaccatgcataactttgatgtgattaagctatttgatcttttaaatagaatcattcgattttgctgacacttagcaatagcccattattttagatataatttctttgtgatcatagtaagtttagagtcatagatgactccctcgaggtcttagtagcatattatgaatttggtatctatgtgattaaataagcacaacaaaattcatatcaaattggtcgataaacacatttttaatattgtgccagactatcattattaatttttaaatcaatatgtagtagtatgaccacaatgtcatattcattagtaaagtacagctgttttttatgccatcaggattatttggcatttaagcagtgccttctactttaaatgatgccattatcctttgaggactctgcctatcaatttggtcagtctagaaatgcaactcattatagaatgaagctgaatagttactgaagcagaatacaactttacaacctcttaaaccagaatatgggagaagcccaatttacctttaaaacttttgggtgtctacacagaaaaaggtgttaatgtgccttgtgaaatttctcaatggtgaatacattttttattctatgtgatttatttctggagatgtacattaatctttgtgaagttgctgtggaatttggttgggtttgtcaaaatgtgtcaaaaatgtgaaatatcccagttctactaattttctaacacaaagttagatggacaaagttagatgacaaagaagaagacaaagttagatggactccataggagagaagaggacttaaaaatgatgccttaatatctgcccccattttgaaagtgaaattttgcggataatgtttctattgcagttgagttagaaataaggaagcattttaaaaccaggtggatgattcaacactagaccacccaggaagggcattccttctgtaataggaaaggtctttaaacctggagtaccacatcacatgtaatgtgtaagtgtggatatttctggagctctcccagatatccagtgtgtctgcatgaatgtgtctctctttatcttttttgttaaggatgcaaatggagagttatatattggattcctcttgcatcactttagatgccttctgtttatattgagcctggcttatttggagttagcttgtaaatttaatgagatcattgtgatggccatgattgcagaatggaaaatgtcactactatgtgccagtttgcttaaatcatttttaagtacccacctgtgctgctaaactctccatttgcattttattggctactatgtttttgctccagagcgggttcctttaactctgatgcctgggtaaattaatcggggtgtgcatgccattgcccttttagcttctgctcctgttctaataaaggctccatctgcttaattggtagacttacaggcctttcttatttcaaaaaatcactttgaaaaaaagcatagcttctcaagggaaagaagaaccagaactcttgaaaaatgtattatttgggagatgttaaatttctgccatcactgtgctgagatgtatgtagtcaatgagaaacagcatccaagataatactggttttcttactactttttttccatctcttgtacatctctatgtctgtatttcatgaaaacctaccttctctaataaaggtgtggtgagctggggacaagacaactctggggatttacctgttatagacaaactctttactttttttctttttgatctggctgccttcttggtgatattactatgagaatgaggagggaattaaggattattgtaaagtgaaatagcagctttgaggtctgaaacactgagggagaagaaggaaaagaagagacatggtaaggattctaaggaggcctgaagatatctgggattcccattctttttgtccacagcatacttaggttggtcaggtgtaagtgaggagagcttgcatagtaagagcagctccagtgtggtattagtagggttaatgattgagtgtgtgatttacagtattggatctaagggtatcatgaagtcagactgtaaccttggacaaactagttaacctctttgggccccagtctctccatctacaaaatgagagtaattaatggtggtattacctcttagggttgttgtcaagattaaatgagctattacaggtaaagtgcttagaaaaacgcctatttgtaatattcatttttactaataactgttattaggagtgggaatagcaatttcagtgagttataaaacattgattatgaaccattttagagaacgatagttgttttattgctaatgtgaacaaaccatactgtatatgaaactttttatggttctccagagaaaccatgtatttttttctgactttgtacctatccttttgcttggatgcctttcttctagaaagttttactgatccttcagggcccatatcaaatgtatcttatcagtgaattgtctctcatccctttcagacagaatgagtttacgccctatcttgggctcccatagcacttatctcgctatgatgcaattctcttctcagatttgtatattctctccttgatggcaatgcagagtcttctcatagtgttaataataacatatgtagcctgtgtatgtgaaacaggtggatgttgctgatacttaattaggaaaggtatagtgattctcatcgtgttcacaagtcagactctccttatacctcaatcactgccgtatcttttaccttgcatatgagacccccagtataagagtgtaataactatctgattcatttgctagtaatgctgaagggaattgttaagctgatctgtttggtttatggaaaagatgtttattcttcctacgccttctcttttttctcctttgcctcctccttttgtccttttccacctcctcttcctccttgtcctcctttttcttccttctctctccctcttctcctttttttggttataattagtttatttaaagctcttgcttatttttgctcatccttaatataaatagatcttcattgtattcgtgacatgttttatcacattcttcatgaaattttaataaacagttgaatattttctattatttatacatatgtgtaatattactcttctcaaatataccattgaatgagtgttttatcttacaatagatggtatccatttttttttgttgtttttttttttttttttttttggagacggagtcttgctgtgtcgtccaggctggagtacacgatcttggctcactgccacctccgcctcccaggttcatgcaattaattctcctgcctcagccacccaagtagctgggattacaggcatatgccaccatacctggctaatttttgtatttttattagagatggggttttaccatgttggccaggctggtatctaactcctgaccgcaagtgatctgcctgccttggcctcctgaagtgctgggattacaggtgtgagccactgtgccaggctggatggtatcttctaatcaagaaaagatataagtatttttatgacatcaaatttaagaataatagccagttatatatttgtgggatcatgtgataagaaaaatatattggtttactattttagatggaataataatgtgtcttttctgatatctttacaagaatgttagaaatcatctgtattgtaatgttgttttaccttatccaaggggaaataaagcatgaacatttataggcttttatttataaatggacttttaaaatatgttttctcacaaagaggaaatttagctctagaaaacaggaaaggattgtaggaactcccatctgcattggaaagtgactgtcactctcgtattggacaatgattgttgcagatgatacctgtttcattctggatcacctttgtttttaaaatgagacataactaattaacagaagagcaagattattggcaactccattaatattagtatagagacagtgctagcaacatggcattttaaagaattaca

SEQ ID NO: 296 - DNA, 4045 bp, Homo sapiens
atgatgcaattctcttctcagatttgtatattctctccttgatggcaatgcagagtcttctcatagtgttaataataacatatgtagcctgtgtatgtgaaacaggtggatgttgctgatacttaattaggaaaggtatagtgattctcatcgtgttcacaagtcagactctccttatacctcaatcactgccgtatcttttaccttgcatatgagacccccagtataagagtgtaataactatctgattcatttgctagtaatgctgaagggaattgttaagctgatctgtttggtttatggaaaagatgtttattcttcctacgccttctcttttttctcctttgcctcctccttttgtccttttccacctcctcttcctccttgtcctcctttttcttccttctctctccctcttctcctttttttggttataattagtttatttaaagctcttgcttatttttgctcatccttaatataaatagatcttcattgtattcgtgacatgttttatcacattcttcatgaaattttaataaacagttgaatattttctattatttatacatatgtgtaatattactcttctcaaatataccattgaatgagtgttttatcttacaatagatggtatccatttttttttgttgtttttttttttttttttttttggagacggagtcttgctgtgtcgtccaggctggagtacacgatcttggctcactgccacctccgcctcccaggttcatgcaattaattctcctgcctcagccacccaagtagctgggattacaggcatatgccaccatacctggctaatttttgtatttttattagagatggggttttaccatgttggccaggctggtatctaactcctgaccgcaagtgatctgcctgccttggcctcctgaagtgctgggattacaggtgtgagccactgtgccaggctggatggtatcttctaatcaagaaaagatataagtatttttatgacatcaaatttaagaataatagccagttatatatttgtgggatcatgtgataagaaaaatatattggtttactattttagatggaataataatgtgtcttttctgatatctttacaagaatgttagaaatcatctgtattgtaatgttgttttaccttatccaaggggaaataaagcatgaacatttataggcttttatttataaatggacttttaaaatatgttttctcacaaagaggaaatttagctctagaaaacaggaaaggattgtaggaactcccatctgcattggaaagtgactgtcactctcgtattggacaatgattgttgcagatgatacctgtttcattctggatcacctttgtttttaaaatgagacataactaattaacagaagagcaagattattggcaactccattaatattagtatagagacagtgctagcaacatggcattttaaagaattacagtggcagttctcccaatcagccagatttcttccagaaaattataaaggaatctcctagataaacttattttcccactggtgttactttatcagcctaagtagtagctctgtaaatagaggactgaacacttgagtttgggtcctgattttgtaattagctgtgtgaattggatcaagtcgtttagattctctgggcctcaatttcttcatctgtaatatgagaaaggtcgaaataattgatttagcaatatattttatcaatcagaaatattagtgatgtcagtgaagcttgtgtatataaattcattttttcaatcatttaaggaacttagatataaaatacacctttaattcacctttggaaattttttacaaagtgttttatttgcaaatgacagtgatagtaagagttaatgtttaaggctattttgtaaatgactttaaatgattctaagtacttgttactcttaactacgctgtttcattcatacattgaaatagatcccctttggaacactggggaagattgaagattgcttttaatttcattatggcacacagaatttagtgaagaaaaatggtagtcctctttcagatagattactaagtcagctgtttggaagtcttggtgtaaaaatgtcttagagctttgcaagttacagagatagaaaatgtatttaattttaatatttctaattcactatttgctttgttagtatttagatttcagtgcttaaaaaattattcacgggattttttcccttcattcaacaacaggttctatagcacatcttgggaaaattatcctgcattggtaggggactgaaagacaggaagatgaaaaatacatgatacctttaataatttttgaattttgaattttggaattttagagggcagataaaactatatctctggggcaataaaagaagacaagtagaagaaagtaatcattgagagagaggaacaaagtcttacagtaattcagatttgggagattatttctatttgggaaaattggccaccaggtagatgttttatgctgggttcctaaaggtagaaatggtgggaaagaaagaaaatgacattgagggcagaggggacagcttgattagtggcttgggaatgggatgaagccagtgttgccaagtagtgtctgttaaaaggagcatattgggaaaatgaggacagaaaggtaaaattaggtcagataatacaggattttgagttcttgtcaaagaatatgaacttgagtctagatttgagtatattactgaaggtttttgagcaagggagggcattactgtgctttagaaagattaatctggccacaatttataatgtaatacagaaaagtaataggtggaaagaagagggagaccaggcacgacgacagtaagagcttagacaagagtcagccaacaaccgaagaatggaaatgtcactgaaaatggaaaagcagaagtagatgtgggcagtttgaattggtagaaaatagccactgatacctggttatcatgggtgtgcgagaggggagggaacatttggagatacttccaaaatttcagttcagaagatcagaagggtggccgggggccattaccaggaagagtgaagtgagggtaaggttgactggggctgggcagaaggggcaatgggaaggagatgaggagttttcggcttcattgacatcctggcagctaagtcagctctccagctagaaatgtgcagcaggcagtggtgatacagtactaagataggataggaagtcaggtctttacgagagcatttcagtaaatagccttaggaacttagattaaaaatcaatgcttgatgaggcagtgagtctagatcgtttttgacagtgaaatcaaataccatgaatacgttgagggagtaatgagacagagatttctttttagaaaagagagcggaatgtgttttctctgagggcagagtcagaagagaggacaagatgaccattataacagaggaaaatagtgcttctgaaattccatttcactttccacagcagtggctaaaattgaaattaaggcactctaatggctactaacattgaattattggattggcaataaaggccctaatgaagtactttcattaggaagaaaatatccacacgtctggaagaaatagtgtgatgccccctgtaaagaaaccagtgaatgtaacgtttcaaatatggagcagccacagcagacttctgtaattctaggtcaacaatgaattaatagaatcagtttcttgttaaaataactgtcttttgccttcatcaatattttagatacccttactggctacctgtcttatggaaagctatgtaattatactattttgagttggatttttatggtttatgctttccatggaaatttgatgggataatctgtttgtgaggtatttatctgcatatttgattccttaacttacctgcgacttcttgactttgttggttttcagaattaaaaacttgaaagaattttgtttattttggcatgtaaagaatactggtctaaaatcacaaccattagaattcatttagatttttcaaagga

SEQ ID NO: 297 - DNA, 4047 bp, Homo sapiens
cattgtattcgtgacatgttttatcacattcttcatgaaattttaataaacagttgaatattttctattatttatacatatgtgtaatattactcttctcaaatataccattgaatgagtgttttatcttacaatagatggtatccatttttttttgttgtttttttttttttttttttttggagacggagtcttgctgtgtcgtccaggctggagtacacgatcttggctcactgccacctccgcctcccaggttcatgcaattaattctcctgcctcagccacccaagtagctgggattacaggcatatgccaccatacctggctaatttttgtatttttattagagatggggttttaccatgttggccaggctggtatctaactcctgaccgcaagtgatctgcctgccttggcctcctgaagtgctgggattacaggtgtgagccactgtgccaggctggatggtatcttctaatcaagaaaagatataagtatttttatgacatcaaatttaagaataatagccagttatatatttgtgggatcatgtgataagaaaaatatattggtttactattttagatggaataataatgtgtcttttctgatatctttacaagaatgttagaaatcatctgtattgtaatgttgttttaccttatccaaggggaaataaagcatgaacatttataggcttttatttataaatggacttttaaaatatgttttctcacaaagaggaaatttagctctagaaaacaggaaaggattgtaggaactcccatctgcattggaaagtgactgtcactctcgtattggacaatgattgttgcagatgatacctgtttcattctggatcacctttgtttttaaaatgagacataactaattaacagaagagcaagattattggcaactccattaatattagtatagagacagtgctagcaacatggcattttaaagaattacagtggcagttctcccaatcagccagatttcttccagaaaattataaaggaatctcctagataaacttattttcccactggtgttactttatcagcctaagtagtagctctgtaaatagaggactgaacacttgagtttgggtcctgattttgtaattagctgtgtgaattggatcaagtcgtttagattctctgggcctcaatttcttcatctgtaatatgagaaaggtcgaaataattgatttagcaatatattttatcaatcagaaatattagtgatgtcagtgaagcttgtgtatataaattcattttttcaatcatttaaggaacttagatataaaatacacctttaattcacctttggaaattttttacaaagtgttttatttgcaaatgacagtgatagtaagagttaatgtttaaggctattttgtaaatgactttaaatgattctaagtacttgttactcttaactacgctgtttcattcatacattgaaatagatcccctttggaacactggggaagattgaagattgcttttaatttcattatggcacacagaatttagtgaagaaaaatggtagtcctctttcagatagattactaagtcagctgtttggaagtcttggtgtaaaaatgtcttagagctttgcaagttacagagatagaaaatgtatttaattttaatatttctaattcactatttgctttgttagtatttagatttcagtgcttaaaaaattattcacgggattttttcccttcattcaacaacaggttctatagcacatcttgggaaaattatcctgcattggtaggggactgaaagacaggaagatgaaaaatacatgatacctttaataatttttgaattttgaattttggaattttagagggcagataaaactatatctctggggcaataaaagaagacaagtagaagaaagtaatcattgagagagaggaacaaagtcttacagtaattcagatttgggagattatttctatttgggaaaattggccaccaggtagatgttttatgctgggttcctaaaggtagaaatggtgggaaagaaagaaaatgacattgagggcagaggggacagcttgattagtggcttgggaatgggatgaagccagtgttgccaagtagtgtctgttaaaaggagcatattgggaaaatgaggacagaaaggtaaaattaggtcagataatacaggattttgagttcttgtcaaagaatatgaacttgagtctagatttgagtatattactgaaggtttttgagcaagggagggcattactgtgctttagaaagattaatctggccacaatttataatgtaatacagaaaagtaataggtggaaagaagagggagaccaggcacgacgacagtaagagcttagacaagagtcagccaacaaccgaagaatggaaatgtcactgaaaatggaaaagcagaagtagatgtgggcagtttgaattggtagaaaatagccactgatacctggttatcatgggtgtgcgagaggggagggaacatttggagatacttccaaaatttcagttcagaagatcagaagggtggccgggggccattaccaggaagagtgaagtgagggtaaggttgactggggctgggcagaaggggcaatgggaaggagatgaggagttttcggcttcattgacatcctggcagctaagtcagctctccagctagaaatgtgcagcaggcagtggtgatacagtactaagataggataggaagtcaggtctttacgagagcatttcagtaaatagccttaggaacttagattaaaaatcaatgcttgatgaggcagtgagtctagatcgtttttgacagtgaaatcaaataccatgaatacgttgagggagtaatgagacagagatttctttttagaaaagagagcggaatgtgttttctctgagggcagagtcagaagagaggacaagatgaccattataacagaggaaaatagtgcttctgaaattccatttcactttccacagcagtggctaaaattgaaattaaggcactctaatggctactaacattgaattattggattggcaataaaggccctaatgaagtactttcattaggaagaaaatatccacacgtctggaagaaatagtgtgatgccccctgtaaagaaaccagtgaatgtaacgtttcaaatatggagcagccacagcagacttctgtaattctaggtcaacaatgaattaatagaatcagtttcttgttaaaataactgtcttttgccttcatcaatattttagatacccttactggctacctgtcttatggaaagctatgtaattatactattttgagttggatttttatggtttatgctttccatggaaatttgatgggataatctgtttgtgaggtatttatctgcatatttgattccttaacttacctgcgacttcttgactttgttggttttcagaattaaaaacttgaaagaattttgtttattttggcatgtaaagaatactggtctaaaatcacaaccattagaattcatttagatttttcaaaggaagtggttgaaaagccggaggactgagataaattggtgccatgttcagtgagaagctggcaaatttatgaaggaatgtgctaatgcaaatacttatgaattgatttgctctacatattttccctagggccccttagtcctctattacttattagaatctttaccttctgtaccacagaagtaaacctaaagcacagccttactaagattgtttttgctttcatggggccagttgaatatatttcatcttccttttatgtgacaaaaataattgagaaacatcaaatgatgtttaattgttttgaaaacataaacaaaactggagattttataaagccttgttctaagcttgaaaagaaggaaaaaaaatcagtttctggctgaaaagtttctgttgacactggaccgatcaaacagttttctttcagacaatatttctatagctgtatcacagaaattaggggctgacagtgaccagtagtttattttcattgcct

SEQ ID NO: 298 - DNA, 4069 bp, Homo sapiens
catttccttctgtgtttttttttttttttttttttgaggtggagtctcgctctgtcacccaggctagagtgcagtggcatgatctcagcttactgcaacgtccgtctcccgggttcaagcgattctcctgcctcagcctcctgagtagctgggattatgggtgtacaacaccactcccggctaattttttgtagttttagtagagacggggtttcaccatgtcggtcaggctggtctcgaactcctgacctcgtgatccacccgcctcggcctcccaaagtgctgggattacaggcgtgagtcaccttgcctggccaattttcttcttttttaaggctaattattatgcatatatcacattttgcttatctctttatcatctatgggtacttgggttttgacttcttggctattgtgaataatgctgctatgaacattggtgtacaagtatccgttttagtctctgctttcatttctttggggtctatataaacatgacgttttaatcagatattttattcacctctcaaagctcttgttccagtgttcacttcctttgaaaaatctgtatgaatatagtattcttttattattgtactcctgagaggagggtgttagccccttttttttgaaatgtgtgcagaactccagtgcttaaaacttccaccagaaaccattggtttctatcccacaagaattccactgaaatgcttctctttggaagccctactgagctgtttaaactgtgtttctttagaacttccaacattttcagcttttccttgactttttctctaatagacatgctttagttaaagctccttcattctgagttgttctgtgaactagatttcatggtttactaactcatatcctaaatagaatcatccaaaagaacgcatagaaacattctgttgattccattttggttggtatgtgactattaagggttcttacagtatggtgaatctcagattcctcagggggctccctgaggctgaggatgatagatctgacgattcacaactctcatctctttgggatacattggtcattgttacagagttaaactgcccgggcagataggaggttctggagttgagggctggtttaactgatcagggcatttaacctgtgtggcattggacctgtaaaatatgacaaatctttgggctggaggaataaggttctgcaactgttaaatttgattaatgattaccctgtgtatggaaaattgattattacattggtagctctctttatgaaattttcttttattctgagcatggccaatagcagtacttatccacattcttgaaaatctttccctttgactgtgacatacaaatcttcattgcttaccttgaatcttaatatcatgcgtgagcaaagtgttagcatatttgcttatttgctcttacttatttttcagaaggtgctacatagtttaaaaaaaaaaagcaaaaaggatgtgtagtaaaaaatctagtgtactgcgtcctaaatgacgcatcatgaccatagactgtcaccgcccttgcaagaggcagccaccgatgccagtttcttgtgtgctcttccagagatacttgctgtattgtcttttattttaaagtgtggcatacatacaggaaagtatgtaaaacatacatggacagcatgaagaatcataattaaaacaatcactattccaagttattgctgatccttagaagctgtctgtgcctccttgatcagatcccccttcttctctcaaaaagtaacctctattctgagtcttgtgattccatgtccagcaaggaagcagggatgttgcatcctaaatgcctaagtgtttaagtctagagactaattcctttaagcattgttggattgttcctggtgcttttgaactccaatgtagatgttgtcatgtaatcactgtgctcctcatctgagctgaaactttgcttctgctttagccatggcatgatttagatatgtgaaagataattccatctcctttgtaatttaatttatttgtgtcattttaggcatattgcatacctgctaatgtagaatggagatctagaatatggaagacagtttaaaacattttaaagcattcaaatgtggcattctggccgggcgtagtggctcacgcctgtaatcccagcactttgggaggctgaagcaggcggatcatgaggtcaggagattgagaccatcctggctaacatggtgaaaccccatctctactaaaaatacaaaaaaaaattagccaggcgtggtggtgggtgcctgtagtcccagctactcgggaggctgaggcaggagaatggcatgaacccaggaggcggagcttgcagtgagccgagatctcgccactgcactccagcctgggtgacagagcgagactccatctcaaaaaataaataaaaaatgaagtggcattctgattgggagttactaagcatatatattataggaaggattaacactcaaaaggagagcttagtcttgttaattttcatgctttgctgagggcctgtgtattagcctgttctcaccctgctaataaagacatacctgacactgggtgatttataaaggaaagaggtttaattaactcacagttccacatggctggggaggcctcacaatcgtggtggaaggcaaaggaggagcaaagtcacgtcttgcatggcggtgggccagagagtgtgtgaggggaactccccttcataaaaccatcagatctcgtgagacttattcactattatgagagcagcatgggaaaaacctttccccctgattcagttacctcccacaatacgtggggattattacaattcaaggtgagatttggatggggacacagagccaaaccatatcatcctgatacaaaacaggtcattaataaatatttattgaatagaattgagctggagagtttgttatatgcatatttaagttactctgcataccattaatatgtttcctcggtttgtagtcctgaagattaggcttgagttcagtatttatctgcttatgtgtcctgtgctgcaactgtcaccctccttgtccctcattcagccctgctctttcacaataaccaccccaagaagacttttcagatttttttttcatctgcatgtaaaaaaaagaagaagaaagaagatacttttattattttggttttggttcttctctcttccctgctttgccttcccttcatacatgcagtggtattagcggtcatgtcccctgaccttggttgaggcaaagcagagggtgtcatatcagttgcagtggaaagatccttctctgtccttgtctgtagctgaacctgctaagtgatattcccttctagtatgaggatggagtacaagtttttgaggttgcattgctgaaggtaaaaccaaaagagagagagagagaaagagagagtgagtgtgtgtgtgtgagagagagaggtgtgtgtgtgtgtgtgtgtgtgtgtgtgtgtgtaactattcttttgaagatgacttggaactattcctaagtaacctcctgtctggcattcactaatttcacctggccaactccagcaatgctgatcttaggatatcttattgtatagcttatattccaaatattggaggaaagagagggagtttggaaagaagttttagtttagagagctcttaaagtactcttggctcatcattctttaaattccaaaaatgactaatttgtggggatacataattaaggaagaaaaggttttgtgagggaaaggagtagcagggagtgctgagagcttggcgtatgtattggaaaattgtggtaacttaacaggtaatcaaggatgttgagagaggtgcttgtcatcatttcaaaagagcgtagaatattttatttcattttgtctactgtggatcggttctcctctcatttacttcttttcacatttcatatttgggagggctttgggctctatcttctatttccttctattaaaaaaagttttataagttattccacttggcattcggaacacaataatgtcatacttcactgaggcatactaatgctctggaaagaa

SEQ ID NO: 299 - DNA, 4055 bp, Homo sapiens
aacaatcactattccaagttattgctgatccttagaagctgtctgtgcctccttgatcagatcccccttcttctctcaaaaagtaacctctattctgagtcttgtgattccatgtccagcaaggaagcagggatgttgcatcctaaatgcctaagtgtttaagtctagagactaattcctttaagcattgttggattgttcctggtgcttttgaactccaatgtagatgttgtcatgtaatcactgtgctcctcatctgagctgaaactttgcttctgctttagccatggcatgatttagatatgtgaaagataattccatctcctttgtaatttaatttatttgtgtcattttaggcatattgcatacctgctaatgtagaatggagatctagaatatggaagacagtttaaaacattttaaagcattcaaatgtggcattctggccgggcgtagtggctcacgcctgtaatcccagcactttgggaggctgaagcaggcggatcatgaggtcaggagattgagaccatcctggctaacatggtgaaaccccatctctactaaaaatacaaaaaaaaattagccaggcgtggtggtgggtgcctgtagtcccagctactcgggaggctgaggcaggagaatggcatgaacccaggaggcggagcttgcagtgagccgagatctcgccactgcactccagcctgggtgacagagcgagactccatctcaaaaaataaataaaaaatgaagtggcattctgattgggagttactaagcatatatattataggaaggattaacactcaaaaggagagcttagtcttgttaattttcatgctttgctgagggcctgtgtattagcctgttctcaccctgctaataaagacatacctgacactgggtgatttataaaggaaagaggtttaattaactcacagttccacatggctggggaggcctcacaatcgtggtggaaggcaaaggaggagcaaagtcacgtcttgcatggcggtgggccagagagtgtgtgaggggaactccccttcataaaaccatcagatctcgtgagacttattcactattatgagagcagcatgggaaaaacctttccccctgattcagttacctcccacaatacgtggggattattacaattcaaggtgagatttggatggggacacagagccaaaccatatcatcctgatacaaaacaggtcattaataaatatttattgaatagaattgagctggagagtttgttatatgcatatttaagttactctgcataccattaatatgtttcctcggtttgtagtcctgaagattaggcttgagttcagtatttatctgcttatgtgtcctgtgctgcaactgtcaccctccttgtccctcattcagccctgctctttcacaataaccaccccaagaagacttttcagatttttttttcatctgcatgtaaaaaaaagaagaagaaagaagatacttttattattttggttttggttcttctctcttccctgctttgccttcccttcatacatgcagtggtattagcggtcatgtcccctgaccttggttgaggcaaagcagagggtgtcatatcagttgcagtggaaagatccttctctgtccttgtctgtagctgaacctgctaagtgatattcccttctagtatgaggatggagtacaagtttttgaggttgcattgctgaaggtaaaaccaaaagagagagagagagaaagagagagtgagtgtgtgtgtgtgagagagagaggtgtgtgtgtgtgtgtgtgtgtgtgtgtgtgtgtaactattcttttgaagatgacttggaactattcctaagtaacctcctgtctggcattcactaatttcacctggccaactccagcaatgctgatcttaggatatcttattgtatagcttatattccaaatattggaggaaagagagggagtttggaaagaagttttagtttagagagctcttaaagtactcttggctcatcattctttaaattccaaaaatgactaatttgtggggatacataattaaggaagaaaaggttttgtgagggaaaggagtagcagggagtgctgagagcttggcgtatgtattggaaaattgtggtaacttaacaggtaatcaaggatgttgagagaggtgcttgtcatcatttcaaaagagcgtagaatattttatttcattttgtctactgtggatcggttctcctctcatttacttcttttcacatttcatatttgggagggctttgggctctatcttctatttccttctattaaaaaaagttttataagttattccacttggcattcggaacacaataatgtcatacttcactgaggcatactaatgctctggaaagaaagaaaaagaaggaaaattaatttagagggaatggaggctaaattttccatggtgaagaaattctgaccttttctgagttatcgtaaaagactgacattgctaccctttggatgttaagaaaaagtctttcagataccttggcttgtaagggacctgggaagcgccagggtccatcaaaaatgtaaagacatttattagaacatgcatatccgaaagctttctgaattctgtggggaccatctagcttttacatgatcttgagggaaccaaagttgtactgagaaaacccagtttcctcttaattccatcctatgtgaaaacaacttaagtctcaactgcactaagttatgaaaatggatcctctttttttaacatttggtttttggttattcatattgtctatattctgttctataattgtatccaagtgttaaaatatattttataaatatactgacactgaaaaagaaatcaaaagctgagaaacgtttgtgaatatggctggagagtctcagtaagatgggggacatctcctcaaattgaagatctgggaagtaagtaatagaaacttacagacagattgaggtgcagttttttttctacttttttttcctgaaaatttcagaaatatgagaagtgaaataatagcaaacatgactcagacctttataaattgtctttcttgacagcagagatgtacaattttgtaaaatattgtcctcagtcttgaactgcagaaactcctttctctgatacctgcggtcttatttaatttttacatcttaacagcaagagcatacccgtgatttgttttcacaaatgttagaaatactgtgtaagaatagacttatttttatattgtaaacttttactttttttttttttttgagactgagttttgctcttgttgcctaggctggagtgcaatggcaagatcttggctcactgcaacctccgcctcccgggttcaagcgattctcctgcctcattctctcaagtagctgggattataggcatgcaccaccatgcctggctaattttgtatttttagtagagacagggtttctccatgttggtcaggctggtcttgaactctcaacctcaggtgatctgcccgctttggcctcccaaagtgctgggattacaggcatgagccaccatgcctggcccaacttttacctttttaaagtatgtttttaaacaaccaataatatttggcataatttagtattttgccagtgcttcattgcttatgtgcaatgaggcatttaacaaaataaattggacatatatatttataattattttacctattccgtcagatagtacatttcttaaggagtaaggaaacttgaaatataactcactacttctcctttttttttttttttttcctgagacggagtcttgctctgtcacccaggctgaagtgcaatggcgcgatctcggcgcactgcaagctccgcctcccgggttcacgccattctcctgcctcagcctcctgagtagctgggactacaggcacctgcaaccacgcccggctaatattttgtattttttttagtaaagacggcgtttcaccgttttagccagaatgatctcgatctcctgacgtcgtgatccgcccgccttggcctcccaaagtgctgggattacaggcgtg

SEQ ID NO: 300 - DNA, 4046 bp, Homo sapiens
agaggtgcttgtcatcatttcaaaagagcgtagaatattttatttcattttgtctactgtggatcggttctcctctcatttacttcttttcacatttcatatttgggagggctttgggctctatcttctatttccttctattaaaaaaagttttataagttattccacttggcattcggaacacaataatgtcatacttcactgaggcatactaatgctctggaaagaaagaaaaagaaggaaaattaatttagagggaatggaggctaaattttccatggtgaagaaattctgaccttttctgagttatcgtaaaagactgacattgctaccctttggatgttaagaaaaagtctttcagataccttggcttgtaagggacctgggaagcgccagggtccatcaaaaatgtaaagacatttattagaacatgcatatccgaaagctttctgaattctgtggggaccatctagcttttacatgatcttgagggaaccaaagttgtactgagaaaacccagtttcctcttaattccatcctatgtgaaaacaacttaagtctcaactgcactaagttatgaaaatggatcctctttttttaacatttggtttttggttattcatattgtctatattctgttctataattgtatccaagtgttaaaatatattttataaatatactgacactgaaaaagaaatcaaaagctgagaaacgtttgtgaatatggctggagagtctcagtaagatgggggacatctcctcaaattgaagatctgggaagtaagtaatagaaacttacagacagattgaggtgcagttttttttctacttttttttcctgaaaatttcagaaatatgagaagtgaaataatagcaaacatgactcagacctttataaattgtctttcttgacagcagagatgtacaattttgtaaaatattgtcctcagtcttgaactgcagaaactcctttctctgatacctgcggtcttatttaatttttacatcttaacagcaagagcatacccgtgatttgttttcacaaatgttagaaatactgtgtaagaatagacttatttttatattgtaaacttttactttttttttttttttgagactgagttttgctcttgttgcctaggctggagtgcaatggcaagatcttggctcactgcaacctccgcctcccgggttcaagcgattctcctgcctcattctctcaagtagctgggattataggcatgcaccaccatgcctggctaattttgtatttttagtagagacagggtttctccatgttggtcaggctggtcttgaactctcaacctcaggtgatctgcccgctttggcctcccaaagtgctgggattacaggcatgagccaccatgcctggcccaacttttacctttttaaagtatgtttttaaacaaccaataatatttggcataatttagtattttgccagtgcttcattgcttatgtgcaatgaggcatttaacaaaataaattggacatatatatttataattattttacctattccgtcagatagtacatttcttaaggagtaaggaaacttgaaatataactcactacttctcctttttttttttttttttcctgagacggagtcttgctctgtcacccaggctgaagtgcaatggcgcgatctcggcgcactgcaagctccgcctcccgggttcacgccattctcctgcctcagcctcctgagtagctgggactacaggcacctgcaaccacgcccggctaatattttgtattttttttagtaaagacggcgtttcaccgttttagccagaatgatctcgatctcctgacgtcgtgatccgcccgccttggcctcccaaagtgctgggattacaggcgtgagccaccgcgcccggcctgcttctccattttgttcacaaaatattttttcctcagaagtgtggcattgaatgatgtattgttttgtagtgagtacattatctcagtgaacacacaatttctttcagatagtcaccagagtagtcatcaaaaggaaaagcaatctaagtaccatttaatgggctgcactacactaatattctatttgatgaattaactgcatgtttttagttatctgttagactagttttcattcttttccttcccttcggtatgataaattcttttaaaatggttttattcaatcccaggaaactgaaaatacttgaaaaaataatattttgcaatttgtcagaaaatatttcctcactacttgactggtaatctcaagcatgattagtatagtgtttcctatgagctagaaggtttttggattagatgtgcaggaataggcattctgcctgcttttaaatgtctagctgcacagctgagcaaaaaagcccaacctggcagtcagaacaggctgcccaggggaactcctattgttcagccccattcaggcaaactataagatcacgcatagtgtccgagccggtgctggtgcctagtgagaacatggacagtccaggcatgggatgtgtggatatgctgccttcgcagtgatcaagaattcaggattttagagcccagtaaatagctcatgagaacttgggtttagaaaatctgaactgctgggccaccctgaagtatcttgaattgaggagcttgggtgaagaagtcctggtatcagttgggggcccttcagatgagctgccaccttgtgactgtccgtcagggtcatcttttggccatccctggttagcgttgccatgtgggtgacaactaggagactttacttgaatgttcccacagatgcatggctgggatggcgtaagttcttttctgtttctggcagcaatggctcaggattagggtttatgaggttaagattaacggagacaatagaagagaatcttgacttgataatatgttttttattttgtaaaagctttgttgcaatataattcatattccaagtaatgtacccattgaaattgtgcatttcagtggtatttagtgtatttatagagctgtacaaccatcaccaccctgtagctattatctccgcatccctacttctccctagctgctggaaaccttgggtctactttctgtttgccattctgagtatttcatataaatagaatcctacagtttatagtgctttaatgactgtcttttttcacttaggatcatgtgtttaaggtttgttcatgttgtagcttttgtggtactttcctttctcttcattgataaataatattccactgtgtggataggctacattttgtttgtccactcatcagtcgatgggcatttgggttgtttccatattttggctattccgaataatgctgctatgaacatttatgtgcaagtttttgtgtggttttattcctcttgagtagaactgctaggcctgttaatatgtttttagtcttttgtgtatatatgggaatattgtcacctagtatgaaatggtttttaaaggcaatcaacaatctaaaacctccagttatttgtgtgtttttttttttttttttttttggagacatgagacagggttttactgtgtcacccaggctagagtccaagtagtatgatctgggctcactacagccttgacctcctgggctcaagcgatcctcccacctctgcctactaagtagctgggaccacaggcacacaccaccacctctggctaattttcctattatttgtagatacagggtttcgccacattaccaaggctgctctccaactctgaggcttcagtgatttgcccaccttggcctcccaaagtgctagaattaagggcgtgagccaccatgcccagcctgcaatgtccttttctgaattcatagacttctcagtattacttagcagctagcctttttttttctttttttttttttttcttttcttttttttttttttttttttttgagagggagtcttactttgttacccaggctggagtgcagtgacacgatatcagctcactgcaacttctgcctctcgggttcatgagatcctcccacctcagcctcctgagt

SEQ ID NO: 301 - DNA, 4044 bp, Homo sapiens
aattataattgcctacgatagcctccactttctgatttaatgttcttctttttctgaatttttaaaaaaatctttttaaaaagttttattatggcttctttacgtgagccttttaaacaacttgagtgaataggaggattcaggaattatggctcatagaagagacatatttaaccttatgcatcagacattgttagacactacgctgtatttgtatagcttcagtgtttggtagctctagatatcaagatagtatttaggaaattttcttttccaacatgttagttagttctgaaataccccaaatggttaatgtagtttataaactccgaaaagctttttatctaatgagagcactgttttaaaaaaaccactaatgattttctagttgaaacatttgaaacaattttgaagtacaggggacttttctttaaaacagtgctcattatactcggaagataagctcttgagcatctgtcatccttgttgatgtattcatactgtttttattctttgaaatgtatttaaatagaaaaaatagttcatgttttttgtcattctttcagactgcagtgttttgttttgaatgtggtgaaattggttttattcctcttgggactgcttatctctagggcctggatgcttcctttaaatagggattcacaggtagtaaatcattagaatttttgtttaacagtgaaagaagtcacttaacataggtctgtcatagttctgtctttgtcactgtatgtagaatttcatagtgatacaacatccattttcttagcaaaaagttaggtctagggtatatctgtttggaaaattacatcagaattgattttcaattaatcaaagttactaaatagtgctctgagttaccagtggtatttaaaattaattttggaagttgcacacatactttatgtgtattttctttttcttgtatgagagaatgatatatattaaattgtagttattgcttataatccttttagaaggcaatggggctactcaaggaggctgaggtgggaggatcgcttgaggccaggaattcaagaccagcatgagcaacataacgagaccccgatctctaagaaattttttaaaaaaagttagtcaggaatggctcatgcctgtagtcctagctacctgggtggctgaggtgggaggattgcccaggacttcaaggctgcagtgaactatgatcttgccactgcactccagcctaagggacagaatgagactttgtttctaaaaaataaaataaaataataaaaataaaagaaaaggaaggcaatgatgttctgcatcagtgacaacagcatgggcattgccaagatctttgatgaccttactgcttacctctccccagattttacataattttatcttcctgtcccattgtacactgacaatactctccttcaagtgtcctcacctcttgatttgtcatatactcttaattttattgctacatttggccatttttttcactttttttctttgttcactttcctttgctccatacttaactaattttccagatttctgtccttaaatctctttcattttcactggatatactcttcccaggcttcccaggcttctgtaacaatctatttgctttgtctccatcccataactctccctgagctctaaattattatatgcaactgctcactggacatacaagttcgtgattcaacagaccctttaaaactcaaatctgtttcccttagtatattcccttgtttgttaatcttgctcagttacccaagccagaaatttaggtatcattcttgaatacattgtttctcttcctttccacacccgatcaatcaaatacacagtcttattgcttcttactttttttttttcttatcttattgcttttattttcagtatttttttgaatcatgaagctgtataaacagacaaggtgatctgtgttgtgttagggctgtctgtgccatgttgctgtgggagtttctatatggaagaggggcattaacaaagctttgaaatgccaaagcagactttccagggaagagcgtctgcagataattctgaagaatgtgttgatagtatcttggccacagggccatgaggcattatcaggggcaggagagagggaggctattcccaggaaaggctccagcatgtgccagagatgatgcagacaacattaagatttgaaaaaatggcccagtgaacaaagtgtttttggttttgagagagagagagattgagagacagagagagagagagaaaccaagggatcatgatagttatagtcaaatagaggaaggattatcttttgaaaatgtgttggttctgtgatacaagaggaagctaagacatatcgtggaaacatctcccccctccaccttaatatcaagaacaaattgtggaatctaatgttaatgagaagtagttccccactgtgtcagatgcgcaaagagaaattggaatatacttatcaagtatattatagatggaattgaattattgtaaagagtagattagagaggaccgccaaagtccagtcccaaacatgatacattaagtgtatcccttagtataataccaaggaaccccaaaagctttacagtgtctaaactctattttacgtcttcctaaactgatatcgtacattcaatttatatatttctgtactaagatcatgaatttagagtttattgagaaattgccagaaaaaaatgtgttaagtttttatcccttaaagagtatctcataacttacagatttgagcagggaggtatataatcaggagtacagtttatgtttgtttattcaaagctctgatctcatgaaaattgctatataaatgcttgttttaacaactgttattattaggggtttgtatgaaagtctgccaacttggtcccaatatttatattataaattaaaatgttttgaaaagaactgcttctcaactgtgatcctcattgtttttgaaacctaaaatatactaatttttaatttttgtagttgaaatagtttttaatgccagcagtcttttggttatcagtttcatttgaagaccagaagttcctgaacaaagaatatttatttcagattaataagtaaataaagtgaaataaaagatttttttcctttgaaattgaggaagatcagttattagtagtacaaactgtgcactagattgtatcttagggttcctaactcattcttaccaatgataataactctgaacccaagaatatctgagacagttctcaattaatttaaaaagtttattttgccagggttaaggatgcacctatgacacagcctcaggaggtcctgaggacatgtacccaaggtagttggggtacagcctgcttttatacattttagggagacataatacatcaatcaatacatttaagatttacattggttcgatctggaagggtgggacaactcaaaatggagggacgggtgcttccaggtcataggtagatttgaaaattttctgattgcctattggttgaaagaattattcaatgtagaaaagaatgtctgggttacaataaggggttgtgaagactaaagttttatcctgctggggaagcctccaagtagcaggcttcagagagaacagattacagatgtttcatatcagacttaaagtctgtgttgatgttaatgctggaggggtgtaatgaggcatgttgaccccctcttccatcttggcctgaactagtttttcaggttaactctggaacgcccttggccaagaggattggtccattcagatggttaggggggcatgtagagttttattttgggtttacataacccattatggaaatgattccttggccctaaggtaattatagattctggatgccatgcttatattaagtagataccaaaatgctacttttagagtttgagtttctcttacgtttttagaaattcaattgagtagaactcgttattaaggaaaaaatactcaagacccgaataatattgccatgaataaagcggttgattagtgattggttgactttatgc

SEQ ID NO: 302 - DNA, 4052 bp, Homo sapiens
aaggacactctaaggaattatttgtgtctgctttaattattaaaaataattttgtttattcagttcaatagaattgtatcttttaaaatacttatagtccttagatactgttttgttataaagtattttgttttgaagatgtctttaaattcactggcttcaaagataacttctgcattattccttgggctttcctcttagttcaatttagaaggaacagagaaaacacaaacatttaggtaaataatggaaataggattcacgtcataaaacgatactttgcaaaattgacaaggtggcaaacatacaggtgatgttagttttttgattaataacaagagacagaatctgaagggttagaggaaatgcataagaatctgaaaaaataaaaggatctggagaagacacccttaaaggtgatgatcaagaagtctgtgttgtataacggggctgttggggctcaaggagaacaaattttaaaagtggcaggaggtatggagaaagctgtgttggtgatgtgagtattatgggcttctcaaagcatggttctgactctggcaaaaagtgggaggtcagagcagagttggctgcttgtaatgggagtgggggagaaagcaactctttaaaaaaatttatgtcaaaatggtattcagtggtccatcacattgaatcaacacacctttattgaaaacatattatttagcacacactctaggggttcatttctcttattctctgaacttgaaatccttttcttgttgatctttcatatgggtcactaaacagattctattttacctgattaaataaatggtaacaaggcctaggtctactccttcgattttactgtatacttacttaacagttcactttgtcagacttctaccccctctacaagattaagaaaattagtggttacagtgtcatgcaattctattcggcttgaaaagttattgaggcatgtttttccacctttttaaccttcatttatttagtagaagcattcccttaagtgtatgatgagtcaacactggttttgcctgactccagtaaagtcaaagcattatttaatttaaaatgtgtgcatgttaagttcctttctttgcatttaattggagacttttttccacagttagctcaccaaaatgttactaggttcctctgtggctgtctactatttgaacagacaagcaactaattagaataacagaacaacatgactgtcattcctccattcttacaggttatttttaaaaagagattttgtttaaaaagagaaaatatgtattatattaaggaaatataagatccatactctccttgaggcattttttcacttcaccatgccaacattcctttattccctatcataataccgatcaagaaatgggaggttttcctaagtcaagaaaacctctcacacataaaaattcaaactgggaaagcaaatgtatcagggggcggcttttaatttgacaaaagatctgctacattacaaaagaatttttctaaagattactttatgtagacaactccctcagtgtaccgaaaatcaaagaatgttctacattttaaacacattttaaaatgggcacacctgttcctaatattcttatgtaaatggacctatttacatgtgagacccaatgtggtgggtaaatgaaaaccagtgtgtgagttactcaagtttgttaatgatgttagaaatatagtcaaaatagctcagtctgctcttgctatgctattttgtccagccaatctctcatcctcccttcatcctaattccagaagagaggataggagtaaaagcaaaatcttattacaaaaaacacactctggaaagaaagaaaactgtattggataatactcagtttggtatttgttttctcctgtctagttcttagtacccttagaattgagataattcattatttgtcactcaggtaggtttcgagtgaactgatatatttaattagatccttaaagcccataggatttatactggtcatttctgtcaattgtgaatctgctcatacttgttcttcatgaaactatggaataatttttcatgtattttcatgtgtcaatctgaaaagaaacttaggttctccagaacagaggagtttatttgaaaatagcagaggattataacccagaaaatgtgtgctgagccagatcacaggcgcatcaaggagactgggaccaaagggagacttttaaagacaaagagaagtcttcataaactgtttgttaaaccagaaagatcattggttacaagagcttgctgtaagagttggcgacaaatcattgttaaagacgtcattactagacagatgtccttgtgcaagctgcttatctggagctttgcggtctaggggaatttccttgctaaaagtcctgttacaggcaaatgtgcagtaaatgcgggaatgtctcctataaggcctttacaggcatttgtgagtgagggctcccccttcgtggccttccaactccatttgctagggtttgacataattgattccattttggtatcaacaactttcacacatggatagttcaaaatggaagctcctgtaaaataatactttcatatgtattttttcatggtgtctagtacctgtgccacatagtgaatgcctgaataaaggaccacatgtattacagttgttagattttcttagggaccctattgtttaaatgacttataataagcacttactgtgtgatggtaaacactatgctatttatgtcacctatacttcttacttaacattaacacaactctacacagtttggaatattgttgaaataatcactttatagctgagagtagagcatgtatgggttaaactcttgcccaaggtcagacagtgagttgacttgtgtcttcccatgttgtcactgatgcgtcttctcctttgctggctcttgttccctttattccttcagtaatatagagaaactacagcctttcattcccaatagagtgaaaatacaccactcattcattatttttcaattatagtgcaaggacgagcagtttaccctaatatccatttcttgtttggttgggaaattcaccaacagagcagaaaagcacagtggggagagacctcaggggaaacacatacaactttgagataaaccctgtttttgttttaatgttaaaatttaacttttaatccctttgtagtatttacacaactgtcagtgaaatgataaatcttctagctcatttcacaagagggcagcactttcttttaaaatttaaagtatgactaaaaaaatacaatcaaattaacgttttctatcatgaagttaagcttgaatgatttacaggaagatgggagcctctctgtcctgggggcaatttatgagttaagatgagtgcagatctgcagggtaacttgggatccttagaaaatggaacgatggattaaaatcaagccctagaatttttgacttgcagtttgaatttggagactattttggtaactttgtaaatgtgtaaaagtctgtcaagatcatgtctttcttttctattatggcaaaacatgaagagtgaatcattttaatatattcaaattgttttgctcatatcaaataaaaagtatttattgagcaatggttttatgtttaggattctataggtcatttgaggaacaaataaatttaacttttttcttcattatttaaagagcttaactcccttggggtgacaaggaagggaaagcacattggcaaaacaacctgtaaacaagccaaggcaacatgtaaataaggtacagggtaacagtacagcataatggagatggccgatttggatagggaattgttgaattagggttttaatgcagggctttgagtagaaggtggaaattgaattggtcctcagtgggtggataaaatttgaatagatttaaaaaaaacaaaacacgaggaggctattatttaagaaaatagaatcctgtcaacagagaaaaagtacaaagtgcatcagggcatgctaggaaagcctgttgtttagaacattgtaggaatgatgcctg

SEQ ID NO: 303 - DNA, 4041 bp, Homo sapiens
ttaggggttcccccccccactttggtctatgccctgatgcaaaaaaagtaaacttacttatattaaaatttacattattctacttgtggtagtgtcaccattataagcactgcatctttatgatgaaactctgcctacaactagagaaacatgtttcaaatggacatttctgttatactttattggtatactgtatagctatgtaatgcaaaagcaaaatcacatttgccttggaatgatatccataatatcactacaaagaatttataatttggattggagtttttttctttaaagcgatgacacttaaaacttcctggaagatggtgtttctctgagtgccagtagtaatttaacatcaaaatggaagacacattcaatgtagttattactcacattttgagtacagtagtttctctcattaagttttatgtcagaaacaagtaaattccctataagaaaacagtctgaatgactttcagcggcatcaaagagatcgaaacactttaaaactattttcttcatcagttgcctgctaacacctttttgaaaaataaaattaatcaacgcgtatttccttttgtgatttgtattgttttgtacattcactcccttttcttttcatgggttggctcccaactggaacatggaacctgtgatccattcaagattgagacaatgtaaaagatagagaactgacttttggggcaggcaggcctccaggaagtgggagtgagctttcacttcaaactgggtgaggggtggtggaaagggaggatgctgattaaaataataaacaactgctggaaagagaagttgattaccacactgctgtcagatcagccaggggagctgccagagcccactgaggctgctctcccctgccacaaagccggcagaagggactagatttgctgcgagagcttttctctggacagacagaacaccttttaaaacaagtttagttctgttgcattgacagcatcccttaggccaggctgacctagggaaatggactgaaactagcttggtggttaccatagcaacccaggctgctggtgtctgggagagtgagaaccggtggcctcttgtcctgtgttttggtgtttcttcagctaagagtacactcctccttcgaactctacataagtcatgctctttgaaaactggctctttacccaggattttttttttttcgttctgaaatcggtctgaatggaggaagttggtaatacttggctttttttttttcttctctcatgcaagtttccaggatatagcttctttttttgctgtatgtaattgagaccaaactctaagcttggggccctggagagaacagttgtggcctgcaggtcattagtgaggtgagcagaagggaatcctggacttcccagagaaagaggagaccatgccagcctcgtggaacacagctaccaggaaatacagaagcaggtctattccttgcgaactccgaagtccatgaaaaaacggacccacagtggggtggctaaaatgtcccagcgcaagctgccgctgctgctgatggaccatagctcaagggcaaggcttgtaaaggattttacaaaggattttaaagtatagccagaaaagatacggtgtttagaagttaaacgctgttgtctgaaggaagtttgccggaaagatgtaggcttcaagggctactggacaatgattggtctgaacttcaacttacgggaactgctgacaaaatttgaaaaggtatgcagaaagcaaacttcatgaatgtacttttttcctttctttcttgccttttttttcactatacatttagatagatgctctattgactctttggtggtttagtataatttataaggaatattcaattttgctgtctcctttaaagatgtttttcaagtaaagggctaattagcaattacttcctttggtcaggagggcttctcatgatgcctgtcacttttagaattccacatcagaagaaactctttgtactcaagtcagctggtaatttaactgaaacttctttggagaaaaaaaaaagaaaatgaaaataaaataaaaatccagcaaaaaacactgggtattggtgccaaagtctgacttcgtaggcatgggttctgttctccatacccctcaggtttatctgtccagccactgcctgccgtgcactgccctgtacagccctctgcctggggactcagctgtgggtggcagaagtcgcttcacagtgacagtggcacatctgacctcaggctttttatctgagcgtgtctgttttaaacatggagtgcttgcatgcactgtgaagctttaatgcttggattattaaatgtgcgtgtagctcttttttccataggaaggctcctggcacaatctagatggagtctagcctgccaaatactaccttacatttatagttaaaacagaaaacctccacatgcgtgtatgcgctcctgccctctttagcctttggatgccaaacaccaatcttcttccaatttccagtctttaaagaaaaagaaaggcagaaaggggtgaagtcctccctcacttggtatgtaagtcaattattaatatttaaaaagctgtgctcagtggctttcaccgtgaatgccccatggatcattgcaagtacaaatactgtagaagcgggactggattgagtcattaaaagaataatgggctttttcttacaaaccacaattgccagagggaaaagatgcaacatcatgccatctgaaaagtttggaagcttttccaaaacaattgcagtcactgcttgccttttgatgataggaacgttatggtgggatgaatgtggagagagaagaatttagctctttgctccctcctggctgcagttgcttctcccaatctctctctgcacctctactgtaatgtaaggattaggcttgtaacacagggcggacttcgacctctcgctttaatatgtggttaagcatctaaattcctgagagtaaaagacggttctccctcagcttgctctccacttagaaggggcggggaaggcaaggaatatcttccttatggcagctggtaacagcaggtgacaaactttatgaccataaagaggtctgttagcttgttttgtatagatttgtctgtttcttcctttaaaggtatagagcatatgttacatgaataattcattacttagaccccctgagaggcagtaattgtgggcaatagctggacttttgtattgtaattgctgctattagtcttaaaagtctaggtcagataccaggggttcctaacctgcctcagcttcaagccattttattggcagagttagaagttctggttatattagcatgtttccccttttaactcccatgtcttagtatttgtcttattcctattttagtagttgaattgacagtagaagatatctactggctttttcctgtcaaaggcttgatttgggatttttattattattattatctatttatttatttatttatttttgagacaaaaggcgaactcaaagaaacagtcctgatgtaattctcagtctgaagttctccatatatgtgtatttttgtgttaggcagttttataaaaacctatgtgaaagttgatctctttggccgtattttacttctaggaagttgtcgtacatgaatgtattctttccaaagtgttaataaaatcctttgcgtattcttacaaaatctgtctcatatattgagatgttgcttcattggtttattggcaggaaaactggaattacggaaaagtatcagtacctcacacgtctcaaatacaactaaccaccttcccccaacaaagcaataatgccatttctagggaaagaccaaggcctactgctataatgcagaagccacaggatcccttcagaagctgagtaacagccattctacacgcagaggtagagtccctttaccctcaattctcagtcctgtctcttcctcagtattagtaacctgtttctagagagaatactagccttaacgatttaccacttttcatatcagcagttgtcattgt

SEQ ID NO: 304 - DNA, 4046 bp, Homo sapiens
tcccatgtcttagtatttgtcttattcctattttagtagttgaattgacagtagaagatatctactggctttttcctgtcaaaggcttgatttgggatttttattattattattatctatttatttatttatttatttttgagacaaaaggcgaactcaaagaaacagtcctgatgtaattctcagtctgaagttctccatatatgtgtatttttgtgttaggcagttttataaaaacctatgtgaaagttgatctctttggccgtattttacttctaggaagttgtcgtacatgaatgtattctttccaaagtgttaataaaatcctttgcgtattcttacaaaatctgtctcatatattgagatgttgcttcattggtttattggcaggaaaactggaattacggaaaagtatcagtacctcacacgtctcaaatacaactaaccaccttcccccaacaaagcaataatgccatttctagggaaagaccaaggcctactgctataatgcagaagccacaggatcccttcagaagctgagtaacagccattctacacgcagaggtagagtccctttaccctcaattctcagtcctgtctcttcctcagtattagtaacctgtttctagagagaatactagccttaacgatttaccacttttcatatcagcagttgtcattgttcagtctgaagtttaggtgaccacagtagaaaggggattttgctgtattcctgaaggaatttcaggctttaagaaaacgagggtccactgttggactagtagactcaaatcctgatacgcttagtagttgaggccaacagctgagcagcaggccttccaatggtggctaatctggaaagttatagactggtcagatcattaaaattcccaggtgaaagcagaccttcagcataactttaagacagcagtttttttgtgaaggtaaattgaaagggatattttagttgatatttttgaattttggagacatccagtggttttgtgatttttactggatataagaatgtttggcatgttatactcatataagaatgtttggcatgtggttgagcaccttgtctcagcatgtgtgatgctgggattgtagtttcccagcacaggcaggatgggcaatttcttacattgggtactgatttctagtcttctagaaccagaaagggcaaggctaggagtctcttgcaggcaggaagtattatgttcctacaagatgacagctcattacagattaggaaggcccaattggagggaaccatgccaactcgagtggtacctaaagaggaagaacttcttaccaggggaggatgaccccataccaagatgtgcctgccagcaagcaggtcctaatcatctaacaaagtgataagggatgagaagttgtggccatgggctcaagggtgactatgggaagagttcacattcaaagttgactagtccaccaacacacctctctgagatccagccaataggtagttttatttgccacgctgattttaattaatttttttccctgaaagtacttcctaaaggaagtatctcatgactttagggactattaacatactgtcatacttaagccatttgcattgtgtactgtatttcttttgtttaatagtcacagaggatagtgtaatggccaattttagctcagtgacattttgagtgactgctgccttttattaatttattcagacctgctactgaatggttaatgataatcgtagttctctaagggattttttgatgtatgtgtctgctgtgtgtgtgagtgccgttctcttagtaccattctcttggtgactccttgggcaaagatgcttcctatcataacaacacagagagaaaccactcaatgctgaattactttatggcatttacctcctttcacatgactctatcttttataattacaatttgaagctatattgtattgctcagtttgccatatctcattttaaaacaaatgtgtcctcaataagatatagtaaacacatttcaaagtctcctcatttattccctacttagcaaatatttgtgaagtatgtaccaggtgctagtctaagtgtatagatggagaagacattgatcttatggccgaatgggaggatacagacaaggacattttcaatgacaactgcataattaagcaaaagtagatgaaattataagagtaatgatagccctaatctcagtacttgtgaagtctctcctggagaaattacatttaaactgagacttaacagatgagtttaagttgaaagaaggaaatgagattatataccaatgtgtgtgcatgtgtgtggcccatgggtggacttgtgtcaggggaagaaattgggagctttcagggtaacagggactgctttgacatgggtcagaagttgagaagctgtgtgccccaggcttgtagttttaaacatttgaaatgcgataatttttctctgggttttctgacctgttcagttttgattacacgatctgatttgtttgttcagttttcatcacactatctgagtttgttccacttagtaatttgactgttttctactctgttgtcttactttttttttttttttggagacatggacttgctgtgttgctcaggctgaccttgaactcctgggctcaagctatccacccacctcgagtcttacctatatttatcatcacagataataggaaaagaacattattagcatcgatttcttaattcagaaatgctgctgtagacctgatgataccacctctattgtcagtcaaaaatgtgattcaatagagtgattaaaatctgtgagattagctgttggaagaaaatttatagaataataattaaaatcaataaattaattgaataattaatgacaattactatcccagaaacctcacaaactgtttcaaaacatatttacatatgacataacctttgaagatgatgttatttgcctattctattattatttaagtaatatatatatatatttttaaaatcatgattcctcattttcaaaacctaaagctctggcagtaatcctgctgagctcctgataataattctgaaatctagtctgacttttgaaaggaatggtggatttattttcctctaatgattaactttgtttagttaggctgagctttgggacatgatagcgaaattgttctaacctcatttcttcttcaccttcaggaaaggggtcagaactccttcagaaaaaaacatcactgttgccacataaggttaagtaaatagttggtgcaaaaataaaccaaaattattttaacaagaccaaagaggatgaatctagtctagcacccatttagttgttgaagacttcctggtggtactgttctaaatctctgtttcctgtcagagatttcagacagttctgtttattataatgtgaggaaatatttttgcttacatatttaagcaaaatatgttttattttcatgatgttttattgatttgttttataatgtatatcacataatttgtttataatgttttataatcaagctactacttgtagctttataatcaagtagtagcttgactgtgaaacattataaacaagttatttgatatacattataaagtgtttacagttatatctctatgggttatatcattagagaaatgcccagttaagggcaaaacttgtagtcaaatactaattattaaataagtaaaaagtaaataaataaatgttttcccgtatttgtgaagtttatcttgatctgaatagtgggtgttgtttacagaaagactaaccacttatcagtgaacctcagtgagcttttgtagccatcttctggagggctgttctgagggtttgcatcttatgcttttgatggtgttttatttagagaaaagtgtgtagtcctatttttctaactcctggcttttcttaaccttctacattatacttacattgttttaaaatacttttcaagtgaatccttaggacattgcttctgccctgttttcaaatgttagttcaactgcttgaatatcttgccatggcccct

SEQ ID NO: 305 - DNA, 4049 bp, Homo sapiens
atttttgctgacacgttaaaagtttgttttttttttaattatactttaagttctgggatacatatgcaaaatgtgcaggtttgttacataggtatacatgtgccatgttggtttgttgcacccattaacccgtcatctacattaggtatttctcctaatgctatcccttccctagcccctcaccccacaacaggccccggtgtgtgatgaaaccgttgttactagtttttatttcttaaagatgatgaacttgtatataaaaatattcttttaacattttagaaataaattttataagactgaaaggacaaactattagtaaatgtttcaaaatgtgaaaaacactttagttatagttatgtaatatcttagtgacctctgtaagatgtaatattttaagggaagttttacctatgtgaaaacgggagagtaagagtctgttggatattaggcaaagttcagtgatttggcaacaacagttgtataagatttcaaaaattgctaattgaatctgatataccaacatctaactagctggtacatgaactatagattacaatacattttttaaaaaaattgaggagtcagtgtattgaacaccttttaaaaaatttcaatttaagttctgggatacatgtgctgaacgtgcaggtttgttccataggtgtacatgtgacatggtggtttgctgcacctatcaacccatcatctaggttttaatccctgcatacattaggtatttgtcctaatgctctccctttcctttcgccctaccccccgacatcccccggtgtgtgatgtccccttccctgtgtccatgtgttctcatttttcagctcccacttatgagtgagaacatgcggtgtttggttttctgttcctgtgttagttgctgaggatgatggtttccagcttcatccatgtccctgcaaaggacatgaactcattcttttttatggctgtatagtattccatggtgtatatgtgccacatttgctttatccagtctatcattgatgggcatttgggttggtttcaagtctttgttactgtaaatagtgctgcagtaaacatacatgtgcatttgtctgtatggtagaatgatttataatcctttgggtatatacccagtaatgggattctgggtcaaatggtatttttggttctatatccttgaggaatcgccacactgtcttccacaatggttgtactaatttacactcctaccaacagtgtaaaagcattccaatttcaccacatcctcgccagcacctgttgtgtacttgccattctaactggcaggagatggtatctcattgtggttttgatttgcatttctctaatgaccagtgctgatgagctttttttcatatgtttgttggccacataaatgtcttcttttgagaagtgactctttgaatcctttgcccactttttgatggggttgtttgctttttttcttgtaaatataagttcctcgtagattctggatattagctctttgtcagatggatagattgcagaaattttctcccattctgtaggttgcctgttcactctgatggtagtttcttttgctgcccagagtaattgatagattcagtgctattcccatcaagctaccattgactttcttcacagacctagagaaaatgactttaaatttcatatggaaccaaaaaagagcctgtatagccaagacaatcctaagcaaaaagaacaaagctggaggtactgaagatttaaagactataattttcagaataataagaattttggaagcacttgaatttcttataatttaaggtgaaatgaactattttgcttgagagcaactcatctgtgaatataaagatatactgattcctaacacttgcattatctatttgcttttttctgtttaggacatccaggcagaaattgatgcccacaatgacatatttaaaagcattgacggaaacaggcagaagatggtaaaagctttgggaaattctgaagaggctactatgcttcaacatcgactggatgatatgaaccaaagatggaatgacttaaaagcaaaatctgctagcatcaggtcagaatagtcaatatcaaaataaaaataatggggtggaaggggtagatacttgtgatttttgtatatcagaaagagaaagcgcagccttaccaccacttctatttcatcagaaatagtttaagattttaatgcaaagcctgtttccttgagttatatagttcaagctctatttgtgtccaatactttctgccacctgttctagactattcataaatgttcatatattttaaatctaacaatactagtaacaatactgttagcaacatctgctaattactgagtgtttaccttgactaagtacttgttaggatctttacaaatgttactttatttcgtaatcaaaaaatcctagtaaggtgggtggtaacattatttcttctatgaggaaacagaggtttaatgaatataaggaacttgccaagttttggggctaagaagtgccaagtcagagtttgaatctagatcttttttactcttggcagtgaacatgttttgcttaatcatgttgttttttatgcctcattcaagatgtatttatagaaattaaatatctcttatggacactaaaatggaaaattgatgattcatgtctgcatttggagagagtaaaattaaataaggatgaaccttaggaccagaattctgactaggaaaagaccttgaaaattacccagagagacagtatgattagtgttattgggatcaagaatattttaagatcatatttaatagagagtggacagctcctaattatatataaatttagtgaatactggctgaaaaatatgttattgagcaaaaatctaaaagcagaacattggcaggaagtcctggatcagcttttgttttgttttgttttttgccttgtaccaagtgtacatcctttaaaccaaatggtcttgaatttgactctgacttcactatttactctctgatcttgaacaaactactcagcctctttgagccttggattattttatttacaaaatcagaatagaaatatttaacactcatgattgctatgaagatttaatggaatggtttgatagttccctaatctatgtaaatcctgcctaagaaagcatctagttaagtatttttatacataaaggggctcactggatctgcctcagctggtttcaagatttaatggagaacagaattttcaatgattacttatcataaatgaattaaaatttttttttctaagatgtattgaaaggtttttattcttctggagctcagagagtggaatttgcagttcctcttacatgtgaggaagggagcaatgcagcatggacatggatgctctgtgtaaagttcccattgggaaatacaataggtcagcattggccaactactttttcttagtaagagaagaaaattagggagttctatgtagtgagggattatacttttttaagatttgaattttcaactgcctagatcccatcaggttgcaactttccattcctcataaatatgaacaaaaatatttaaaatattaatagtgaaaagcattcactgagcatccagcaagtcatctatgccagcaacctaagaattccagagctggccctagtgaagatggtatacatggtgctgggattttcagaggttagagaatgacttatttaggaagaataatttaatgaagacctatatcataaacagatcattctaagtaaaaagttacagacaagaaatttttggtctttcttgggagttattgcctaagcctatcatgacacatttttttttaacctggaaagaaagaacttataaactacagttggaatattatgtaataagtaagttaacattatttttagaagatgggagaatatgcttgtggcagtggacttttgcattaaggtagatcagacattccagtaaaatgtaataataaattaatgtgataatgaattaaaataacttttactttgattagtcacctcaagagattcaa

SEQ ID NO: 306 - DNA, 4035 bp, Homo sapiens
tgttgcacccattaacccgtcatctacattaggtatttctcctaatgctatcccttccctagcccctcaccccacaacaggccccggtgtgtgatgaaaccgttgttactagtttttatttcttaaagatgatgaacttgtatataaaaatattcttttaacattttagaaataaattttataagactgaaaggacaaactattagtaaatgtttcaaaatgtgaaaaacactttagttatagttatgtaatatcttagtgacctctgtaagatgtaatattttaagggaagttttacctatgtgaaaacgggagagtaagagtctgttggatattaggcaaagttcagtgatttggcaacaacagttgtataagatttcaaaaattgctaattgaatctgatataccaacatctaactagctggtacatgaactatagattacaatacattttttaaaaaaattgaggagtcagtgtattgaacaccttttaaaaaatttcaatttaagttctgggatacatgtgctgaacgtgcaggtttgttccataggtgtacatgtgacatggtggtttgctgcacctatcaacccatcatctaggttttaatccctgcatacattaggtatttgtcctaatgctctccctttcctttcgccctaccccccgacatcccccggtgtgtgatgtccccttccctgtgtccatgtgttctcatttttcagctcccacttatgagtgagaacatgcggtgtttggttttctgttcctgtgttagttgctgaggatgatggtttccagcttcatccatgtccctgcaaaggacatgaactcattcttttttatggctgtatagtattccatggtgtatatgtgccacatttgctttatccagtctatcattgatgggcatttgggttggtttcaagtctttgttactgtaaatagtgctgcagtaaacatacatgtgcatttgtctgtatggtagaatgatttataatcctttgggtatatacccagtaatgggattctgggtcaaatggtatttttggttctatatccttgaggaatcgccacactgtcttccacaatggttgtactaatttacactcctaccaacagtgtaaaagcattccaatttcaccacatcctcgccagcacctgttgtgtacttgccattctaactggcaggagatggtatctcattgtggttttgatttgcatttctctaatgaccagtgctgatgagctttttttcatatgtttgttggccacataaatgtcttcttttgagaagtgactctttgaatcctttgcccactttttgatggggttgtttgctttttttcttgtaaatataagttcctcgtagattctggatattagctctttgtcagatggatagattgcagaaattttctcccattctgtaggttgcctgttcactctgatggtagtttcttttgctgcccagagtaattgatagattcagtgctattcccatcaagctaccattgactttcttcacagacctagagaaaatgactttaaatttcatatggaaccaaaaaagagcctgtatagccaagacaatcctaagcaaaaagaacaaagctggaggtactgaagatttaaagactataattttcagaataataagaattttggaagcacttgaatttcttataatttaaggtgaaatgaactattttgcttgagagcaactcatctgtgaatataaagatatactgattcctaacacttgcattatctatttgcttttttctgtttaggacatccaggcagaaattgatgcccacaatgacatatttaaaagcattgacggaaacaggcagaagatggtaaaagctttgggaaattctgaagaggctactatgcttcaacatcgactggatgatatgaaccaaagatggaatgacttaaaagcaaaatctgctagcatcaggtcagaatagtcaatatcaaaataaaaataatggggtggaaggggtagatacttgtgatttttgtatatcagaaagagaaagcgcagccttaccaccacttctatttcatcagaaatagtttaagattttaatgcaaagcctgtttccttgagttatatagttcaagctctatttgtgtccaatactttctgccacctgttctagactattcataaatgttcatatattttaaatctaacaatactagtaacaatactgttagcaacatctgctaattactgagtgtttaccttgactaagtacttgttaggatctttacaaatgttactttatttcgtaatcaaaaaatcctagtaaggtgggtggtaacattatttcttctatgaggaaacagaggtttaatgaatataaggaacttgccaagttttggggctaagaagtgccaagtcagagtttgaatctagatcttttttactcttggcagtgaacatgttttgcttaatcatgttgttttttatgcctcattcaagatgtatttatagaaattaaatatctcttatggacactaaaatggaaaattgatgattcatgtctgcatttggagagagtaaaattaaataaggatgaaccttaggaccagaattctgactaggaaaagaccttgaaaattacccagagagacagtatgattagtgttattgggatcaagaatattttaagatcatatttaatagagagtggacagctcctaattatatataaatttagtgaatactggctgaaaaatatgttattgagcaaaaatctaaaagcagaacattggcaggaagtcctggatcagcttttgttttgttttgttttttgccttgtaccaagtgtacatcctttaaaccaaatggtcttgaatttgactctgacttcactatttactctctgatcttgaacaaactactcagcctctttgagccttggattattttatttacaaaatcagaatagaaatatttaacactcatgattgctatgaagatttaatggaatggtttgatagttccctaatctatgtaaatcctgcctaagaaagcatctagttaagtatttttatacataaaggggctcactggatctgcctcagctggtttcaagatttaatggagaacagaattttcaatgattacttatcataaatgaattaaaatttttttttctaagatgtattgaaaggtttttattcttctggagctcagagagtggaatttgcagttcctcttacatgtgaggaagggagcaatgcagcatggacatggatgctctgtgtaaagttcccattgggaaatacaataggtcagcattggccaactactttttcttagtaagagaagaaaattagggagttctatgtagtgagggattatacttttttaagatttgaattttcaactgcctagatcccatcaggttgcaactttccattcctcataaatatgaacaaaaatatttaaaatattaatagtgaaaagcattcactgagcatccagcaagtcatctatgccagcaacctaagaattccagagctggccctagtgaagatggtatacatggtgctgggattttcagaggttagagaatgacttatttaggaagaataatttaatgaagacctatatcataaacagatcattctaagtaaaaagttacagacaagaaatttttggtctttcttgggagttattgcctaagcctatcatgacacatttttttttaacctggaaagaaagaacttataaactacagttggaatattatgtaataagtaagttaacattatttttagaagatgggagaatatgcttgtggcagtggacttttgcattaaggtagatcagacattccagtaaaatgtaataataaattaatgtgataatgaattaaaataacttttactttgattagtcacctcaagagattcaagcacttattcaagcatgtaataaaaacttatttctgtgcttaaggcattgctattaataagatgtagtccctacccctagaggttcacaaatctgttta

SEQ ID NO: 307 - DNA, 4052 bp, Homo sapiens
cttttaacattttagaaataaattttataagactgaaaggacaaactattagtaaatgtttcaaaatgtgaaaaacactttagttatagttatgtaatatcttagtgacctctgtaagatgtaatattttaagggaagttttacctatgtgaaaacgggagagtaagagtctgttggatattaggcaaagttcagtgatttggcaacaacagttgtataagatttcaaaaattgctaattgaatctgatataccaacatctaactagctggtacatgaactatagattacaatacattttttaaaaaaattgaggagtcagtgtattgaacaccttttaaaaaatttcaatttaagttctgggatacatgtgctgaacgtgcaggtttgttccataggtgtacatgtgacatggtggtttgctgcacctatcaacccatcatctaggttttaatccctgcatacattaggtatttgtcctaatgctctccctttcctttcgccctaccccccgacatcccccggtgtgtgatgtccccttccctgtgtccatgtgttctcatttttcagctcccacttatgagtgagaacatgcggtgtttggttttctgttcctgtgttagttgctgaggatgatggtttccagcttcatccatgtccctgcaaaggacatgaactcattcttttttatggctgtatagtattccatggtgtatatgtgccacatttgctttatccagtctatcattgatgggcatttgggttggtttcaagtctttgttactgtaaatagtgctgcagtaaacatacatgtgcatttgtctgtatggtagaatgatttataatcctttgggtatatacccagtaatgggattctgggtcaaatggtatttttggttctatatccttgaggaatcgccacactgtcttccacaatggttgtactaatttacactcctaccaacagtgtaaaagcattccaatttcaccacatcctcgccagcacctgttgtgtacttgccattctaactggcaggagatggtatctcattgtggttttgatttgcatttctctaatgaccagtgctgatgagctttttttcatatgtttgttggccacataaatgtcttcttttgagaagtgactctttgaatcctttgcccactttttgatggggttgtttgctttttttcttgtaaatataagttcctcgtagattctggatattagctctttgtcagatggatagattgcagaaattttctcccattctgtaggttgcctgttcactctgatggtagtttcttttgctgcccagagtaattgatagattcagtgctattcccatcaagctaccattgactttcttcacagacctagagaaaatgactttaaatttcatatggaaccaaaaaagagcctgtatagccaagacaatcctaagcaaaaagaacaaagctggaggtactgaagatttaaagactataattttcagaataataagaattttggaagcacttgaatttcttataatttaaggtgaaatgaactattttgcttgagagcaactcatctgtgaatataaagatatactgattcctaacacttgcattatctatttgcttttttctgtttaggacatccaggcagaaattgatgcccacaatgacatatttaaaagcattgacggaaacaggcagaagatggtaaaagctttgggaaattctgaagaggctactatgcttcaacatcgactggatgatatgaaccaaagatggaatgacttaaaagcaaaatctgctagcatcaggtcagaatagtcaatatcaaaataaaaataatggggtggaaggggtagatacttgtgatttttgtatatcagaaagagaaagcgcagccttaccaccacttctatttcatcagaaatagtttaagattttaatgcaaagcctgtttccttgagttatatagttcaagctctatttgtgtccaatactttctgccacctgttctagactattcataaatgttcatatattttaaatctaacaatactagtaacaatactgttagcaacatctgctaattactgagtgtttaccttgactaagtacttgttaggatctttacaaatgttactttatttcgtaatcaaaaaatcctagtaaggtgggtggtaacattatttcttctatgaggaaacagaggtttaatgaatataaggaacttgccaagttttggggctaagaagtgccaagtcagagtttgaatctagatcttttttactcttggcagtgaacatgttttgcttaatcatgttgttttttatgcctcattcaagatgtatttatagaaattaaatatctcttatggacactaaaatggaaaattgatgattcatgtctgcatttggagagagtaaaattaaataaggatgaaccttaggaccagaattctgactaggaaaagaccttgaaaattacccagagagacagtatgattagtgttattgggatcaagaatattttaagatcatatttaatagagagtggacagctcctaattatatataaatttagtgaatactggctgaaaaatatgttattgagcaaaaatctaaaagcagaacattggcaggaagtcctggatcagcttttgttttgttttgttttttgccttgtaccaagtgtacatcctttaaaccaaatggtcttgaatttgactctgacttcactatttactctctgatcttgaacaaactactcagcctctttgagccttggattattttatttacaaaatcagaatagaaatatttaacactcatgattgctatgaagatttaatggaatggtttgatagttccctaatctatgtaaatcctgcctaagaaagcatctagttaagtatttttatacataaaggggctcactggatctgcctcagctggtttcaagatttaatggagaacagaattttcaatgattacttatcataaatgaattaaaatttttttttctaagatgtattgaaaggtttttattcttctggagctcagagagtggaatttgcagttcctcttacatgtgaggaagggagcaatgcagcatggacatggatgctctgtgtaaagttcccattgggaaatacaataggtcagcattggccaactactttttcttagtaagagaagaaaattagggagttctatgtagtgagggattatacttttttaagatttgaattttcaactgcctagatcccatcaggttgcaactttccattcctcataaatatgaacaaaaatatttaaaatattaatagtgaaaagcattcactgagcatccagcaagtcatctatgccagcaacctaagaattccagagctggccctagtgaagatggtatacatggtgctgggattttcagaggttagagaatgacttatttaggaagaataatttaatgaagacctatatcataaacagatcattctaagtaaaaagttacagacaagaaatttttggtctttcttgggagttattgcctaagcctatcatgacacatttttttttaacctggaaagaaagaacttataaactacagttggaatattatgtaataagtaagttaacattatttttagaagatgggagaatatgcttgtggcagtggacttttgcattaaggtagatcagacattccagtaaaatgtaataataaattaatgtgataatgaattaaaataacttttactttgattagtcacctcaagagattcaagcacttattcaagcatgtaataaaaacttatttctgtgcttaaggcattgctattaataagatgtagtccctacccctagaggttcacaaatctgtttagattaaggtagggcccaaagcagagagtggttactctcacttcagatgatcaaagaaggcttcataaaagaggtcattccttagctgagccttgaaacatatatagttattccccagatagtctaggtgatgactggggaagggtaactaagttaggggcttgaaataaca

SEQ ID NO: 308 - DNA, 4337 bp, Homo sapiens
acctctttccatctgtaggaatgctgatgttacatatagagagggactgtgactctacccctcatgtaagcctgaacctggaaggtacttctcttgtggggatgcagtcaccccactgttctagaatggctgtctacaggtgcacccacgccaagctcctgtgggagcagccccaggtgtgtctgcaatggtgggtgaaggagagaagtcccctcctccaagacccttcaggagcaccagggctgcctgactcttggggcagagctgcagactttctccactgagcccagcattacacccatgcctctgctgaaagaaacttcccacaggtggaaatgtctgggagtcaaggcctgctgtcttcattcttttgtcattcttttgtcccacgggttgctcccttgatgtggagcactccctctttcccctaggaggaggaatccctgagggccagactattgtgaatgctgctgctccactcagtctagcaacccatttggactgccacagtccaggctggtgcagggggaatgtctgcaagggatccagtgatgtgacctgtcctgaagtctcacagcagtgggtgccagcaccagctctgaggggggttgcagaggagtgatgtagactctgtgatattccttggttataaatagccttagtgtgttggctttctcacatgccatgtgtaatagtaacgaacaggtcacgtgggcagactcagggcctcctggttagccagggtgatgcaggtaatggtgacggccaaggtcacacaagttttccccttcctggtgtggtgttattctccttgcagatgctatcatggagtgagtcagttggcctccagctagaaggtggcacttggaaaagggcactggctgtggtggtactggtgggatttatgctttgccttatgttacccaggggaggtactctggtgtcccaagcaatgggaggggccatagagctcccaaaagtttctgttttttttttttttttttttttgtgtgtgtgtgtgtgtgtgtgtgtgtgtgtgtgttaagctaccaggaggagtgaaggggcaaaaccaggagggaggtgggtcaggcaagtccatgctctggctctccacaggcagacgcaagcagcagccctagtgggattggaggacagtttgctggctgctggggtagtgttccaaggaggagcacagctgcctctgctgcacagaagagtgcaaatgaggggggtgtagccagcagcagtaagacccacctagcttccctgcacttggcaaggcaggtctcacatctgcagcattccactaacagcaacagctagcaaagttccagccagtctgcactgaaactcaaaactgccccagatcataagccttcccagtggagatggaaactgcagggctttcaggccatgcccatcctcatctgcccatgaagcaggggcacccagctcctatgcccactcaagtttatatcatgaatttcagttgggagcatctcttaacctgcgacccgtgcctgagttaattggctgacctccacaaggtctcctgtgagacaggatcaggaatgacttcccttcatccctctggagactgggagtgcacacacagcacatcccgatgtggttccttctcatctactccccattgctcactacaccagctccggagctgggtagggttaaggccttttccctgacctggattgccaggttccccggtgggtgtgtatgtgctgtaggcagtttctccctttttcacactctggggacttacaatttttggcctggctcatgatatacactgcagcctgctgcttctttcaaagggtctgtggtgtctgtcagttttcttgttaagttcctgtgttgcttcttggaaataagttcacagtatgaatctttacacactatttcgtctttccaagtggaagaagcatgctaacaatgcttccaattcaacatctagggaaaaaaaaagttttattcagtttatatgctagatctacaatatttcaacttgattatttatttatttatggaacagagtcttgctctgctgcccaggctggagtgcgatggtgcaatcttggctcactacaacctccatctcccaggttcaagtgatgctcatgcctcagcctcccatgtagctggaaatacaggcacgtgccaccatgcccagctaatttttgtatttttagtagagacaaggtttcgccatattggctgggctgctctcgaactcctggcctcaagtgatccaccctcctcggccttccaaagtgctagggttacaggcgtgagccactgcacctggccccaacttgattatatttaaatgcacatcctaaagtattttcaactgtcaaattctccagcttttaaacatttattccttttttttcctgaattttcacatctttcttctaatcttcagttacttaaacccttcctcttttcagactccattaatcccttctacctagtttggagcccatcataagatacttcagcagtgtcaagagcttgaatttcctttccccttttaacttcttctatttcccagtctctgacattccaatgtccatactctctctatcccttgtctttaatcttggattctgcctagtgttgcactagaaagtgaaaaatggtaacattgatcctgctataatttgatactttctacttaaaattggcattgtgatttgcaatgattttctattatattcaccaccttgtctattttattttattttttaattatttattatttagatttcatgtttattttatttaacttttactttcagttcagggtacatgtacaggtttgttatataggtaaactagtgtcatgggggtttgttgcacagattatttcatcactcaggcattcagcctagtaccctatagttatttttcctgatcctctccctcctcccatcttccatcctctgataggccccagtgtttgttggtctcctctatgtatccaagtgttctcatcatttagctcccacttataagtgaagacatgtggtatttggttttctgttcctgcattagttttctcaggataatggcctccagcttcatccctgttcctgcaaagaacatggtctcgttctttttcatggctgcatagtattccatggtgtatatgtaccacagtttttcaatccagtcttatcattgatgggcatttaagttgattccatgttgttgctattgtgcatagtactacaatgaacatacatatgcatgtgtctttataatagaatgatttatattcctttgggtatatacccagtaatgggattgctgggtcaaatggtatttatgtttttaggtctttgaggagtcgccacactgtcttctcaatagatgaactaatttacactccaaccaacagtgtaaaagtgttcctttttctcctcaaccttgtcagcatctgttatattttgactttttactaatagccattctgactggtgtgagatggtatctcattgtggttttgatttgcatttctctaatgatcagtgatgttgaaggtttttttttaatatgcttgtcagctgcatatatgtcttcttttgaaaagtgtctgttcatgtcctttgcccactttttatggtgtttgttttttccttataaatttgtttacattccttatagatgctcaatattagacctttgtcagatgcatagtttgcaacaattttttcccattctgtatgtttactctgttgatagtttcttttgctgtgcagaagctctttagcttaattagatcccatttatcaaatttttgcctttgttgcagttgcttttggtgtcttcatcatgaaatttttgcccattcctatgtgtagaatggtattgcctcagttgtctttcagggtttttttttttatagttttgggttttacatttaagtatttaatccattttgagtttatttttctatatgatataaggaagaggtccagtttcaatgttttgcatatggctagccagttacccagcaacgtttattgaatagggaatcatttccccattgcttatttttgtcagctttgtcaaagatcatatagttgtagccatacagccttatttctgagttctctgttctgttccattggtctatgtgtctatttttataccagtaccgtgctgttttggttactatagacctgtagtatagtctgaagtcaggtatcatgatgcctccagctttattctttttgcttaggattgccttggctattgtgctcttttttggtttcatatgaattttaaaatagttttctctagttctgtga

SEQ ID NO: 309 - DNA, 4072 bp, Homo sapiens
ttgagtcttctctcttttcttctttattagtcttgctagcagtctatctattttatttcattttttttcaaaaacccagctcctggataagttgatcttttgaatggtttttttgtgtctcagtctcctacagttctgctctgatatcaccatgcctattttaaaagattttgatcctttttagtccccaaattctctctctgcaggtggccttttttttttttttgagagtgaggctatctgattgatactctttatgctacttggagtatttaatatgcattggttctgtatttcacattatgcttttattgcgctaaagttgatattaaagttttatagcataaaatgtcatggcagggaacatttgctctaatttatcataattttttaaaaagaaaatgtctgctaagatcataataacagctaatatttatatgctagatctaccctaagtgttttacaggtattaacttctttgaccatggtgtggccattggaacaatgtaataatatgtggctcaataccataggttaatatcttaaacgttatttttcattctctttggatagccatgattaaactttttttttttttttgagacagagtctcactgtgttgccagggctggagtgcagtggcatgatctcagctcattgcaacctccgcctcctgggttcaagcgattctcctgcctcagcctcccaagtagctgggattacaggcacccgccattacgcccagctaattttttgtatttttagtagagacggggtttcaccgtgttggccaggctgctcttgaactcctgaccttgtgattcacccgcctcagcctcccaaagtgctgggattacaggcgtgagccactgcgctcagcctaaactttttatatgctaaaatccaacatgctacatctcctttagcatctaaaacaatacatacaatgataaatttcacttcaatctgtacaagagaagaatgctaatgatttgaaacgtcagctagaagacaggctgtcaggaacttttattatattttttactcactggaaaaatatgaattggaaatacactaataagttctctgctgtggataacatgggtttaaattttcatgttaaacttatttaatttgagattgtcttaattaaatatccatttatcagcataatgatgtttaatatagatctttattaacatggtttcaaaggccagtaaaattgtcaaatctaatgaaaacagagttcaaagataaaattctatcttccctttcttttatgagtctattaaaaattcagggcacctttttaaaagcccgtagagaagattaacctttaacatcatcatttaaatctaatgttaccacattttacagtgtcattgacactatgtttagccttagatagttgcttttcctaaccatattgtgaaactactaaattttttttttttccaaatctaatagaggaactgctctcttttttttctggtttctctagtgtagcacattctaatagaactttctccaatgatagaaattatctatatctacactggttaatacaattgctgctagccatatgtggcctaatgagcacttgaaatgtgaccagtgcaactgataatctgaatttcaaaatttactcattttatttatcctaaattaaaatttaaatagccacatgctgctgatgtctactgtattggaatcacggctttggtgttcttttcagcaccgtcagactgaattctgaagacttgactcttttctcctaatatgtcttaattcctttcctgggagtaggaacaatcttttaaagttacttgttgttcttggactaataaaggtattttctttcattataacccaatttatagtttggagattttaccataaaccaaaatatatatatatacttttgtagtaagaataccaaattggacatttgattctgggtagtcattacacaacagaggatgggatatctgccagagtgggtgctccgtaaatgtttacttgtgctgagtaaatgaaaaactgtattttattttaaccaatgctccttctcacacttactcacactatttccttttatatctgtacactgggagaaggaataataacttgcttgaagatacagtttgtttgaaagttggaggcttttgctgatttaaaacagatactggtttgtagttacttccataattcctttctactgtgcttaaatgatgaagtaccatttttatgggtctttaccttctaacatgtttttgcattacattttttaagaataactggtcacttaaaaatacttatagagttgtaaaaaatgattcaattttaaaaggagtaacttgcgtaaaagatattctgtagtagacatcatcctaggttgataatacagtcaataaaagtgtttattgctttgtacatatcaaagtactaaaggagtgaactgaagcagctgagatgttagaataagtcaattgtctaaaaatatgaatgcccacagatatgtttgataaagaaatgttttatgtgaagattttgaaaatctggttgatcactagttatcaatagtcttagagaaatttaagttttaaaatgcttataggataattgagaaagtaccactaagctgaacgcaaatttaaagtttcttcttacaaagcattcgacctgttgcccaagaaaaggctttcatctttcaagatgaaagaattaaaatgaaactagaacactgaaggctgctacagaagcatgcatttatttgagcatatggtagtaatccactaaacacatagttataatctatttgagaataaccagaacagatttgccagacaaagattctggcagatcaacttgctttttactatgaaaaatcaaagatgcagagaagcacacatataccaatgttttctttttgatttcaaagccacttcagcatttcttttaaaaagtattgtcttcatcctcataattaatagatagtttttcagattctaaatactgtaagtttcagtaatcagtttcattatttctgtgcagtcaaagaagactgcattggaaaatatgtttgtgtgcatttcaatacaataagtgtttgcaactcaatttcaaaggaatataatgtgtgatttagttattgattattgagttaaactacagacgttgaagatgcaggatcaaatcatctgaaataaaagggcagggaacacgtataaatgttttgcacacggagacactcaagtgcttcttgattgaggacatctgatttctagctggttttgcaattaaaaatattggaaagaaattgcagtagctcagtcaaatttatttgctgcaaaatggcttagaactacagagaattttcagttaatataattgaaattatttagttctgctctgtgacaagtgaaattattagttatcagggaaaggtaattacatatttggcctaaagttaatcaatatgaacacagaaaagctggagctcaagcagaatcaggaccttgttaaccacagttttgtaaaatgagttcaattgtagcacctgtggaataaatagaactgatcataaatacaagaaaataaattttctaatcatactgttctcagagatttacaaaatgctttgaacttcgttctgtatttaaactttttttattatttcacacagcgttttttaatcagcatatgctgatgaaaggcagacgtgtgccttgttacacctctaaacctcaaagatcatgggcagtcacagtaattccatttccccaagttaaggcataagcccgcattcacagtctgccctctgggatgatgcaggattgagtcaagcccagttcgattccttgagtcgctggagttgtttctgactgatccatattttcaaatccagcccaccagtgggcctgaggctggataagtgggctttcaccagggccctaacaagagcaaaaaaggaacatgtgcatagatttatactcctattctcaagggcctttgctcttattggaaccttaaccatatcaaaatgtatttcctaaacatatctgtgattatg

SEQ ID NO: 310 - DNA, 4043 bp, Homo sapiens
cctggataagttgatcttttgaatggtttttttgtgtctcagtctcctacagttctgctctgatatcaccatgcctattttaaaagattttgatcctttttagtccccaaattctctctctgcaggtggccttttttttttttttgagagtgaggctatctgattgatactctttatgctacttggagtatttaatatgcattggttctgtatttcacattatgcttttattgcgctaaagttgatattaaagttttatagcataaaatgtcatggcagggaacatttgctctaatttatcataattttttaaaaagaaaatgtctgctaagatcataataacagctaatatttatatgctagatctaccctaagtgttttacaggtattaacttctttgaccatggtgtggccattggaacaatgtaataatatgtggctcaataccataggttaatatcttaaacgttatttttcattctctttggatagccatgattaaactttttttttttttttgagacagagtctcactgtgttgccagggctggagtgcagtggcatgatctcagctcattgcaacctccgcctcctgggttcaagcgattctcctgcctcagcctcccaagtagctgggattacaggcacccgccattacgcccagctaattttttgtatttttagtagagacggggtttcaccgtgttggccaggctgctcttgaactcctgaccttgtgattcacccgcctcagcctcccaaagtgctgggattacaggcgtgagccactgcgctcagcctaaactttttatatgctaaaatccaacatgctacatctcctttagcatctaaaacaatacatacaatgataaatttcacttcaatctgtacaagagaagaatgctaatgatttgaaacgtcagctagaagacaggctgtcaggaacttttattatattttttactcactggaaaaatatgaattggaaatacactaataagttctctgctgtggataacatgggtttaaattttcatgttaaacttatttaatttgagattgtcttaattaaatatccatttatcagcataatgatgtttaatatagatctttattaacatggtttcaaaggccagtaaaattgtcaaatctaatgaaaacagagttcaaagataaaattctatcttccctttcttttatgagtctattaaaaattcagggcacctttttaaaagcccgtagagaagattaacctttaacatcatcatttaaatctaatgttaccacattttacagtgtcattgacactatgtttagccttagatagttgcttttcctaaccatattgtgaaactactaaattttttttttttccaaatctaatagaggaactgctctcttttttttctggtttctctagtgtagcacattctaatagaactttctccaatgatagaaattatctatatctacactggttaatacaattgctgctagccatatgtggcctaatgagcacttgaaatgtgaccagtgcaactgataatctgaatttcaaaatttactcattttatttatcctaaattaaaatttaaatagccacatgctgctgatgtctactgtattggaatcacggctttggtgttcttttcagcaccgtcagactgaattctgaagacttgactcttttctcctaatatgtcttaattcctttcctgggagtaggaacaatcttttaaagttacttgttgttcttggactaataaaggtattttctttcattataacccaatttatagtttggagattttaccataaaccaaaatatatatatatacttttgtagtaagaataccaaattggacatttgattctgggtagtcattacacaacagaggatgggatatctgccagagtgggtgctccgtaaatgtttacttgtgctgagtaaatgaaaaactgtattttattttaaccaatgctccttctcacacttactcacactatttccttttatatctgtacactgggagaaggaataataacttgcttgaagatacagtttgtttgaaagttggaggcttttgctgatttaaaacagatactggtttgtagttacttccataattcctttctactgtgcttaaatgatgaagtaccatttttatgggtctttaccttctaacatgtttttgcattacattttttaagaataactggtcacttaaaaatacttatagagttgtaaaaaatgattcaattttaaaaggagtaacttgcgtaaaagatattctgtagtagacatcatcctaggttgataatacagtcaataaaagtgtttattgctttgtacatatcaaagtactaaaggagtgaactgaagcagctgagatgttagaataagtcaattgtctaaaaatatgaatgcccacagatatgtttgataaagaaatgttttatgtgaagattttgaaaatctggttgatcactagttatcaatagtcttagagaaatttaagttttaaaatgcttataggataattgagaaagtaccactaagctgaacgcaaatttaaagtttcttcttacaaagcattcgacctgttgcccaagaaaaggctttcatctttcaagatgaaagaattaaaatgaaactagaacactgaaggctgctacagaagcatgcatttatttgagcatatggtagtaatccactaaacacatagttataatctatttgagaataaccagaacagatttgccagacaaagattctggcagatcaacttgctttttactatgaaaaatcaaagatgcagagaagcacacatataccaatgttttctttttgatttcaaagccacttcagcatttcttttaaaaagtattgtcttcatcctcataattaatagatagtttttcagattctaaatactgtaagtttcagtaatcagtttcattatttctgtgcagtcaaagaagactgcattggaaaatatgtttgtgtgcatttcaatacaataagtgtttgcaactcaatttcaaaggaatataatgtgtgatttagttattgattattgagttaaactacagacgttgaagatgcaggatcaaatcatctgaaataaaagggcagggaacacgtataaatgttttgcacacggagacactcaagtgcttcttgattgaggacatctgatttctagctggttttgcaattaaaaatattggaaagaaattgcagtagctcagtcaaatttatttgctgcaaaatggcttagaactacagagaattttcagttaatataattgaaattatttagttctgctctgtgacaagtgaaattattagttatcagggaaaggtaattacatatttggcctaaagttaatcaatatgaacacagaaaagctggagctcaagcagaatcaggaccttgttaaccacagttttgtaaaatgagttcaattgtagcacctgtggaataaatagaactgatcataaatacaagaaaataaattttctaatcatactgttctcagagatttacaaaatgctttgaacttcgttctgtatttaaactttttttattatttcacacagcgttttttaatcagcatatgctgatgaaaggcagacgtgtgccttgttacacctctaaacctcaaagatcatgggcagtcacagtaattccatttccccaagttaaggcataagcccgcattcacagtctgccctctgggatgatgcaggattgagtcaagcccagttcgattccttgagtcgctggagttgtttctgactgatccatattttcaaatccagcccaccagtgggcctgaggctggataagtgggctttcaccagggccctaacaagagcaaaaaaggaacatgtgcatagatttatactcctattctcaagggcctttgctcttattggaaccttaaccatatcaaaatgtatttcctaaacatatctgtgattatggagttcataatctaagaatctgaaggtgcatttctgtgttaaatgcagaaat

SEQ ID NO: 311 - DNA, 4032 bp, Homo sapiens
acctttaacatcatcatttaaatctaatgttaccacattttacagtgtcattgacactatgtttagccttagatagttgcttttcctaaccatattgtgaaactactaaattttttttttttccaaatctaatagaggaactgctctcttttttttctggtttctctagtgtagcacattctaatagaactttctccaatgatagaaattatctatatctacactggttaatacaattgctgctagccatatgtggcctaatgagcacttgaaatgtgaccagtgcaactgataatctgaatttcaaaatttactcattttatttatcctaaattaaaatttaaatagccacatgctgctgatgtctactgtattggaatcacggctttggtgttcttttcagcaccgtcagactgaattctgaagacttgactcttttctcctaatatgtcttaattcctttcctgggagtaggaacaatcttttaaagttacttgttgttcttggactaataaaggtattttctttcattataacccaatttatagtttggagattttaccataaaccaaaatatatatatatacttttgtagtaagaataccaaattggacatttgattctgggtagtcattacacaacagaggatgggatatctgccagagtgggtgctccgtaaatgtttacttgtgctgagtaaatgaaaaactgtattttattttaaccaatgctccttctcacacttactcacactatttccttttatatctgtacactgggagaaggaataataacttgcttgaagatacagtttgtttgaaagttggaggcttttgctgatttaaaacagatactggtttgtagttacttccataattcctttctactgtgcttaaatgatgaagtaccatttttatgggtctttaccttctaacatgtttttgcattacattttttaagaataactggtcacttaaaaatacttatagagttgtaaaaaatgattcaattttaaaaggagtaacttgcgtaaaagatattctgtagtagacatcatcctaggttgataatacagtcaataaaagtgtttattgctttgtacatatcaaagtactaaaggagtgaactgaagcagctgagatgttagaataagtcaattgtctaaaaatatgaatgcccacagatatgtttgataaagaaatgttttatgtgaagattttgaaaatctggttgatcactagttatcaatagtcttagagaaatttaagttttaaaatgcttataggataattgagaaagtaccactaagctgaacgcaaatttaaagtttcttcttacaaagcattcgacctgttgcccaagaaaaggctttcatctttcaagatgaaagaattaaaatgaaactagaacactgaaggctgctacagaagcatgcatttatttgagcatatggtagtaatccactaaacacatagttataatctatttgagaataaccagaacagatttgccagacaaagattctggcagatcaacttgctttttactatgaaaaatcaaagatgcagagaagcacacatataccaatgttttctttttgatttcaaagccacttcagcatttcttttaaaaagtattgtcttcatcctcataattaatagatagtttttcagattctaaatactgtaagtttcagtaatcagtttcattatttctgtgcagtcaaagaagactgcattggaaaatatgtttgtgtgcatttcaatacaataagtgtttgcaactcaatttcaaaggaatataatgtgtgatttagttattgattattgagttaaactacagacgttgaagatgcaggatcaaatcatctgaaataaaagggcagggaacacgtataaatgttttgcacacggagacactcaagtgcttcttgattgaggacatctgatttctagctggttttgcaattaaaaatattggaaagaaattgcagtagctcagtcaaatttatttgctgcaaaatggcttagaactacagagaattttcagttaatataattgaaattatttagttctgctctgtgacaagtgaaattattagttatcagggaaaggtaattacatatttggcctaaagttaatcaatatgaacacagaaaagctggagctcaagcagaatcaggaccttgttaaccacagttttgtaaaatgagttcaattgtagcacctgtggaataaatagaactgatcataaatacaagaaaataaattttctaatcatactgttctcagagatttacaaaatgctttgaacttcgttctgtatttaaactttttttattatttcacacagcgttttttaatcagcatatgctgatgaaaggcagacgtgtgccttgttacacctctaaacctcaaagatcatgggcagtcacagtaattccatttccccaagttaaggcataagcccgcattcacagtctgccctctgggatgatgcaggattgagtcaagcccagttcgattccttgagtcgctggagttgtttctgactgatccatattttcaaatccagcccaccagtgggcctgaggctggataagtgggctttcaccagggccctaacaagagcaaaaaaggaacatgtgcatagatttatactcctattctcaagggcctttgctcttattggaaccttaaccatatcaaaatgtatttcctaaacatatctgtgattatggagttcataatctaagaatctgaaggtgcatttctgtgttaaatgcagaaattattattgaaacaaagacctcacctttaaatgagagtataaagtactgcagtgactttcgcccaactgttctctattcacactggtcatttgtcactagacattggtcaaccttaagccaaatagtatcctgtcgaagcaatgcctgattattttccaactttttgaagtaaacattgctattgttctgctttttggttacaacagaaggagtttttggttacaagagaaagtaacacatcagtaatttccattcctaaaaaagttaatcaagaccaggcgcggtggctcacacctgtaatcccagcactttgggagtccctggccggtggatcatgaggtcaggagtttcagaccaggctgaacaacatggtgaaatcccgtctctactaaaaatacgaaaattaaccgggcatggtggcacatgcctgtaattccagctgtattcaggaggctgaggcagcagaatagtttgaacccaggaggcagaggtcgcagtgagccgagattgcgccactgcactccagcctgggtgacagagcaatactctgtctcaaaaaaaaaaataataataataattagtcagtggtttttttttttttttttttttttttttggaaagaaaaatactatgagtctgttgtaaatccttaaatggcgtaaaaatagctaaaattaggtatttactgtgctcttagtggttattttcctctctctctctccatgtatagagataaaatgagaaaaaaatatatttggatgtgcgtatatactatacataaactatcaaaacttggtttataattgtacattctatcacggacatccttcttgaaagccttcgttttgtataggtctgtgttttaaattttgatagttattaccaataaatcctctgaatattatagcctattcaaaatagctgtttcttacaggaaatggatatatgtgtgtatacatatgtataaatatatatacttatgtaatatatgtattgtatatatgtatatcatacatatatatgtatatatagtatattataaatacatatatatatgtatttacaaggagtcagtctcttttgtggaagtaaacattacttggtcagataagattattatgctaaaggaaggtagataattttgtgaatgtaatttgcatttctaaatgtggttattattattattattatctctcaacagggcccatttggaggccagcgctgagaagtggaacaggtt

SEQ ID NO: 312 - DNA, 4046 bp, Homo sapiens
aaatttatttgctgcaaaatggcttagaactacagagaattttcagttaatataattgaaattatttagttctgctctgtgacaagtgaaattattagttatcagggaaaggtaattacatatttggcctaaagttaatcaatatgaacacagaaaagctggagctcaagcagaatcaggaccttgttaaccacagttttgtaaaatgagttcaattgtagcacctgtggaataaatagaactgatcataaatacaagaaaataaattttctaatcatactgttctcagagatttacaaaatgctttgaacttcgttctgtatttaaactttttttattatttcacacagcgttttttaatcagcatatgctgatgaaaggcagacgtgtgccttgttacacctctaaacctcaaagatcatgggcagtcacagtaattccatttccccaagttaaggcataagcccgcattcacagtctgccctctgggatgatgcaggattgagtcaagcccagttcgattccttgagtcgctggagttgtttctgactgatccatattttcaaatccagcccaccagtgggcctgaggctggataagtgggctttcaccagggccctaacaagagcaaaaaaggaacatgtgcatagatttatactcctattctcaagggcctttgctcttattggaaccttaaccatatcaaaatgtatttcctaaacatatctgtgattatggagttcataatctaagaatctgaaggtgcatttctgtgttaaatgcagaaattattattgaaacaaagacctcacctttaaatgagagtataaagtactgcagtgactttcgcccaactgttctctattcacactggtcatttgtcactagacattggtcaaccttaagccaaatagtatcctgtcgaagcaatgcctgattattttccaactttttgaagtaaacattgctattgttctgctttttggttacaacagaaggagtttttggttacaagagaaagtaacacatcagtaatttccattcctaaaaaagttaatcaagaccaggcgcggtggctcacacctgtaatcccagcactttgggagtccctggccggtggatcatgaggtcaggagtttcagaccaggctgaacaacatggtgaaatcccgtctctactaaaaatacgaaaattaaccgggcatggtggcacatgcctgtaattccagctgtattcaggaggctgaggcagcagaatagtttgaacccaggaggcagaggtcgcagtgagccgagattgcgccactgcactccagcctgggtgacagagcaatactctgtctcaaaaaaaaaaataataataataattagtcagtggtttttttttttttttttttttttttttggaaagaaaaatactatgagtctgttgtaaatccttaaatggcgtaaaaatagctaaaattaggtatttactgtgctcttagtggttattttcctctctctctctccatgtatagagataaaatgagaaaaaaatatatttggatgtgcgtatatactatacataaactatcaaaacttggtttataattgtacattctatcacggacatccttcttgaaagccttcgttttgtataggtctgtgttttaaattttgatagttattaccaataaatcctctgaatattatagcctattcaaaatagctgtttcttacaggaaatggatatatgtgtgtatacatatgtataaatatatatacttatgtaatatatgtattgtatatatgtatatcatacatatatatgtatatatagtatattataaatacatatatatatgtatttacaaggagtcagtctcttttgtggaagtaaacattacttggtcagataagattattatgctaaaggaaggtagataattttgtgaatgtaatttgcatttctaaatgtggttattattattattattatctctcaacagggcccatttggaggccagcgctgagaagtggaacaggttgctgatgtccttagaagaactgatcaaatggctgaatatgaaagatgaagagcttaagaaacaaatgcctattggaggagatgttccagccttacagctccagtatgaccattgtaaggtaagtggataacctatagtgagtcgcttaattcaaattctagtgaggtagatatttgaaatacaattatagataagtatcagagttgaaccaattatcacaggattcccccccccaccaccgtctgcttttagttgccagtagacatttaaagtgcatacattgtttccatttgtattatcttcacatttaactaaatttttttcaaacactaccagtatctgaagtataatattgcttttagcttattatgaagtttatctaaatttctaataggttttagaatcataatatattgaggttttgggttttttttgttttttgtttgtttgtttgtttgttttaccaagtttcactcttgttgcccaggctggagtacaatggcatgatctcggctcactgcagcctctgcttcctgggttcaagcgattctcctgcctcagtctcccaagtagctgggactacaggtgcctgccatcacacccaactaactttgttttttttttttaagatggagtcttgctctgtcacccaggttggagtgcagtggcatgatcacagctcactgcaacctctgcctcccaggttcaagtgattctcctgcctcagcctcccaagtagctgggactacaggcacctgcaaccacccccagctaattttgtattttgtatttttttttttagatggagtctcgctctgttgcccaggctggagtgcagtggcatgatctcagctcactgcaaccttcacctcctgggtccaagagattctcctgcctcagcctcccaagtagctgggactacaggcgcatgccaccatgcccggctaatttttgtatttttactagagacgggatttcaccatgttggtcaggctggtctcgaactcctgacctcaggtgatctgtcttcctcggcctcccaaagtgctgggattacaggcatgagccaccttacccgacctgagaaaatttttaaactacaaattaatcttaaattcaaaaggcatcgagtcataaggaattacaaactatcttgtttgtgtttaataaaagtgaaaaataaggacttgtagtaaaaaaaaaaaaaagtaatgcagatgaagaccatactatttaaaatcattttatgtgttttacttttctgagccaagccttttctttgattacatttttatactgctcaaatttctgttcctatgcaaatgtatacttttactctgatcagccaaaagatatgctgaaatgttatcaactgacacattaatccttagatccttgtgtgattaaatttgtgccttgttcactttccattgatttctttaatatctctttatgcccattttcttgtatatacatatcatcttattttattgtatttttcactcctcccatgtaatgaaagttctcattctaaatctggtcattttaaggtgacactatgattctatttccattttaaaaatgacaaacacgaatgcacacatctcctaaaggaaaatgtcatttatgtaataagttgctttaatacaaaatgataagaccctgaaatttatttatttgctttttgaacccttgtgactagattatcaaaattaccatttgggtgtattttttttctttctactcgaagcaggaatatgatagagaaatagctccaagataagaaaaaggaaaacactgttgatgtatgatatgcaagataataataataatagaagatttaaaatgaccgatttaagaaaatcctattctctcctaactttttctaacttttacttctattaattattcatacagtagtccctttttgtgggttacagtattagggatgaaacagaataacacaaagctcttctaatagatgtgctctgtaaggaatacaagctgcttatggcca

SEQ ID NO: 313 - DNA, 4046 bp, Homo sapiens
gggaaaggtaattacatatttggcctaaagttaatcaatatgaacacagaaaagctggagctcaagcagaatcaggaccttgttaaccacagttttgtaaaatgagttcaattgtagcacctgtggaataaatagaactgatcataaatacaagaaaataaattttctaatcatactgttctcagagatttacaaaatgctttgaacttcgttctgtatttaaactttttttattatttcacacagcgttttttaatcagcatatgctgatgaaaggcagacgtgtgccttgttacacctctaaacctcaaagatcatgggcagtcacagtaattccatttccccaagttaaggcataagcccgcattcacagtctgccctctgggatgatgcaggattgagtcaagcccagttcgattccttgagtcgctggagttgtttctgactgatccatattttcaaatccagcccaccagtgggcctgaggctggataagtgggctttcaccagggccctaacaagagcaaaaaaggaacatgtgcatagatttatactcctattctcaagggcctttgctcttattggaaccttaaccatatcaaaatgtatttcctaaacatatctgtgattatggagttcataatctaagaatctgaaggtgcatttctgtgttaaatgcagaaattattattgaaacaaagacctcacctttaaatgagagtataaagtactgcagtgactttcgcccaactgttctctattcacactggtcatttgtcactagacattggtcaaccttaagccaaatagtatcctgtcgaagcaatgcctgattattttccaactttttgaagtaaacattgctattgttctgctttttggttacaacagaaggagtttttggttacaagagaaagtaacacatcagtaatttccattcctaaaaaagttaatcaagaccaggcgcggtggctcacacctgtaatcccagcactttgggagtccctggccggtggatcatgaggtcaggagtttcagaccaggctgaacaacatggtgaaatcccgtctctactaaaaatacgaaaattaaccgggcatggtggcacatgcctgtaattccagctgtattcaggaggctgaggcagcagaatagtttgaacccaggaggcagaggtcgcagtgagccgagattgcgccactgcactccagcctgggtgacagagcaatactctgtctcaaaaaaaaaaataataataataattagtcagtggtttttttttttttttttttttttttttggaaagaaaaatactatgagtctgttgtaaatccttaaatggcgtaaaaatagctaaaattaggtatttactgtgctcttagtggttattttcctctctctctctccatgtatagagataaaatgagaaaaaaatatatttggatgtgcgtatatactatacataaactatcaaaacttggtttataattgtacattctatcacggacatccttcttgaaagccttcgttttgtataggtctgtgttttaaattttgatagttattaccaataaatcctctgaatattatagcctattcaaaatagctgtttcttacaggaaatggatatatgtgtgtatacatatgtataaatatatatacttatgtaatatatgtattgtatatatgtatatcatacatatatatgtatatatagtatattataaatacatatatatatgtatttacaaggagtcagtctcttttgtggaagtaaacattacttggtcagataagattattatgctaaaggaaggtagataattttgtgaatgtaatttgcatttctaaatgtggttattattattattattatctctcaacagggcccatttggaggccagcgctgagaagtggaacaggttgctgatgtccttagaagaactgatcaaatggctgaatatgaaagatgaagagcttaagaaacaaatgcctattggaggagatgttccagccttacagctccagtatgaccattgtaaggtaagtggataacctatagtgagtcgcttaattcaaattctagtgaggtagatatttgaaatacaattatagataagtatcagagttgaaccaattatcacaggattcccccccccaccaccgtctgcttttagttgccagtagacatttaaagtgcatacattgtttccatttgtattatcttcacatttaactaaatttttttcaaacactaccagtatctgaagtataatattgcttttagcttattatgaagtttatctaaatttctaataggttttagaatcataatatattgaggttttgggttttttttgttttttgtttgtttgtttgtttgttttaccaagtttcactcttgttgcccaggctggagtacaatggcatgatctcggctcactgcagcctctgcttcctgggttcaagcgattctcctgcctcagtctcccaagtagctgggactacaggtgcctgccatcacacccaactaactttgttttttttttttaagatggagtcttgctctgtcacccaggttggagtgcagtggcatgatcacagctcactgcaacctctgcctcccaggttcaagtgattctcctgcctcagcctcccaagtagctgggactacaggcacctgcaaccacccccagctaattttgtattttgtatttttttttttagatggagtctcgctctgttgcccaggctggagtgcagtggcatgatctcagctcactgcaaccttcacctcctgggtccaagagattctcctgcctcagcctcccaagtagctgggactacaggcgcatgccaccatgcccggctaatttttgtatttttactagagacgggatttcaccatgttggtcaggctggtctcgaactcctgacctcaggtgatctgtcttcctcggcctcccaaagtgctgggattacaggcatgagccaccttacccgacctgagaaaatttttaaactacaaattaatcttaaattcaaaaggcatcgagtcataaggaattacaaactatcttgtttgtgtttaataaaagtgaaaaataaggacttgtagtaaaaaaaaaaaaaagtaatgcagatgaagaccatactatttaaaatcattttatgtgttttacttttctgagccaagccttttctttgattacatttttatactgctcaaatttctgttcctatgcaaatgtatacttttactctgatcagccaaaagatatgctgaaatgttatcaactgacacattaatccttagatccttgtgtgattaaatttgtgccttgttcactttccattgatttctttaatatctctttatgcccattttcttgtatatacatatcatcttattttattgtatttttcactcctcccatgtaatgaaagttctcattctaaatctggtcattttaaggtgacactatgattctatttccattttaaaaatgacaaacacgaatgcacacatctcctaaaggaaaatgtcatttatgtaataagttgctttaatacaaaatgataagaccctgaaatttatttatttgctttttgaacccttgtgactagattatcaaaattaccatttgggtgtattttttttctttctactcgaagcaggaatatgatagagaaatagctccaagataagaaaaaggaaaacactgttgatgtatgatatgcaagataataataataatagaagatttaaaatgaccgatttaagaaaatcctattctctcctaactttttctaacttttacttctattaattattcatacagtagtccctttttgtgggttacagtattagggatgaaacagaataacacaaagctcttctaatagatgtgctctgtaaggaatacaagctgcttatggccatatgctaatagtgtttaccgaaatccacatcttgaggtatgaaatgattttcctcttctggccttagcacataaagtatgtatcagcctctcagtctgtcctgg

SEQ ID NO: 314 - DNA, 4046 bp, Homo sapiens
catttgataagaccaatggaaggtttggatagtagccagttatttttgaattgcttgaagagaatcttgtaaatttgtagtccagaggtaattctgcgattgcttcaatacttggaattgcaatagagttgtaagtactgattcttttacaagaccatgtataaaccaagaagtcttctgtattttccagtcccaaaactgaatcgataaaaaagagtgccattttttagataaagtgtttagaggctttgcctttggcctctcatattttcctttcttctctagaggctctgactcctcgggcctctgactcctcacgccttcatcccctctgagttcttctaggatctaagacaccagagaggtcctggtatagaaaaaaacacagtccctgtttacatgaaatttacattcaagggagatcctctgcttatccttaaacttagagttcctgttctctgtgttttgagaaatcatttcccaaaaggttatggctgagctgtgaactgcgcattgttatcccaaatctcaggttgtctttgcccagtcatccacttctgtaaccccaacttttctcccttggtgttttagtctgtcttttgctgctgtaacagaatgtcagggactgagtcatttataaggaagagagatttatttggctcacacttttggaggctgggctcacagttccagaggcggggaagttcaaatcaagggcctgtatctgatgagggtcttcctgctgtgtcatccaatggtggaaagcacaaaggcaagagagcgttcatgacagagaggagatggaagctgaacttatcctttgagcccactcctgctataactaacccactcccactgtgataatgacattagtccattcatgaaggtcaaaccctcatgacctaatcaccgcttaaaggctgctcctcttaatatcagcacagtgtcacttaaatttcatcttgagttttggaggggacattcaaaccatagtacttcgttgcaattcgggcaagcttttagttcatgtacccatttatttccaatctcttctttaagggaatacagaactcttttcaattataacattatgatgtagctttaaacagaacataaaataacttttaaaaccaattttttcagatatgttttagcttactgaaataaagttgcttctcttttcatttagtcttgtctattattataaattctgttagtattttttctgatctcctactttttaggtcttttcctttttgtaataaagtttaaaaatctttttagctacaaagaactcttgtcttacagctcaaaagtacataattagaatcaatcaagatcaaccctcagatggcttgatactaatattagccaaggttttttattccctaaaagttcccatagaaagaaagggaccttgtacttgatttctaattcattctctaatcttaaggtaatagtttgaattactttatttcaagcaacacaatactgattaatttgacgtaaactctcactgctaatttaagatgtctaaagaatatcagatggaattttgtgaagagacaaagaacttaacactaatttaattattccaaaaggtatgatctcataaatgcaagttttgaataccactatatacaacctttatttaggggttgatttatagaaactcatatattctgagtcttctgattccgaactatctttatatattctagtcctttatatgtacataaatgatttaatgactccttttcaaagttactctttgataatagtggtgccaatcatttcattccccatccatccacccacctatccacactattcaccaaatgtcttaatgttaaagttgatgcttctgtacgaagagcaataaggtatagcctctgcacctcagtgatatattttaataattcctattactaaaagccctgtgcttgtggtttgttggctgtatccagagggaatactttacatttaaatgtttaggtgatggctctgagatttcgccttagaatagggatataaagcaatgctttaaagcatctcctatgttcaaacacctagcggttatagatcaaatataaaaaacagaaaaccaaacatggcattgtgggctccaaaacatgacaatcattctacaggccagaaacaaagcagaaaagcaaactagctagtgatgttgatgctgctggaaaaatgtagcagaccctagtgatgagcaggcaggaagccccatagcaaagactcagctcaaaacccttctcttacacacagaaatgagtgattcacagattggcatcctttccttccgtagtgtaaatgccccaggcactgctattatgaaacttcagtgtattgttgatccttaattaaatgtgcgtactttcttgggtgttttaatcagtgtctcagaacattgatatattttcagcaacatcaataataaatactttgttcagtgcttcaacaatacataaacatttgagacctggggcctagcacatagtaaacactcagtaaaaggtggctgatatcttttcccataattgttgggagtcttttctgatagttttgatcatttttattttgtttaaaactatataggctacatgagcagttttaactaaataaaactgtattaatacctgttatttaccacctagtataacccaacagaactagctttcaattactatctagattaacccgtcaaattagacaagggtcaccttatagtctttgcaagtatcagtttggtaaacagcacactcattatttttttcgtgtaagtacatgtttaattccctcaaatgttaacataaattgctacttaaaaaatatgtagtgttttaaggactgttttaaaataaatggataggctaggcactgtggctcatacctgtaatcccagcactttgggaagccgaggcgggtggatcacttgaggccaggagttctagattaggctggccaacatggtgaaacctcatctctgctaaaaatataaaaattaggtgtggtggcgggtgcctatcatctcagctacttgttggagactgaggcagtagaatcgcttgaacccagggggcggaggttgcagtgaaccaagatcacacctctgcactccagcctggcaacagattgagactcccgtctcaaaacaaacaaacaaacaaaaaaaaaaaagcagcttactaataaataataaaataaatgggtaaagttgaatcttcccatctaatgacttcaatcgaatttttagaatcatttttgaagttttgaagaagctgaggtcacttatatgcaacttccctttcaagaatgtgagcttatcattcagtcaacaattacctataatgcacctacaatgtatatagtgtttgtaatgttatggatttactctaaccaaatgctcttgagtggataaaattgcagatgcagattttactgtacaatttgcacttcattttcataacaatgtaaatattaagttatgtaggagcaattatcagagctctaataccctttctccaatagaatgcatatttgatgttagaaaagcaaatctagaataattgaaagtgcatgattcaggtataatttcttgtttgtgtgttctttccctcagggctactctggcctttgcttaacccagtttatttcctatattcaagctttattatataagactcagaacatatctggccttaagctgaattgccaagaaacattagcaaacttgctcattaaaataacaaattctaacattgtctttaaaacaacaacaccctactgttaaatttaggctgtgtgtgtgtgtgtgtctgtgcacacgtaggtgtggtagaattttttttccctactaaagtaatcggagactctgcctgaaattctgtaattttgaggtcttgttgtgttagaaggttgcctacagtgggaaacttgtctttttctgaaattaaaaaaaattattttccaagttcctctccaacctttgccagtctgtgttgacttactccttattaaacgctcagctc

SEQ ID NO: 315 - DNA, 4043 bp, Homo sapiens
ggaaatcctgttggttctctgttcaaaatatagaatctgaatctaccacctgtgacactcctctgtctctggaagtatcagtccagcaaccagagtgttcctattaaaataaatcaaactctgtaggggcttcctaacttattcagaggaaaagccacagctctcggaatggtctgcaaggccctgcctgatctgacctaccccctactcacaccttgctcatttcctctcttgctgttttttctctgacacactggtttcggccacactggtcccttgctgagctttcagtcacagtgccagcctgtctgctctgcccaaaatgccccttctttactcaacttctctacttgaactgcagctccctctgagcactccttctctctctctcattctctctctcttccccccccacccttttctacttctttctttttctatagcatttatcagaatctaacacaatgacttattttctatgtcttttttttttttttgcttggtactctggatgctcgataaaagttgaatgttgactgaaagagctatacccaagggaacatgtcctttggtgtgaatgttccttttgtctctttatttctcagtaattcttttttattcatttgcgttctaaagaatattacattttgaaaatattcctactttaaatagccaaatgtttaataaaggtaataactgaaatagaagtgtaagcaataatcttgtctcgagagctagaaatcatttcagttacatgacatatttgaaatgtaagcaaattaaataacacaatggcactttatgccttgatattgtagtcagttcagaggttatcttttctctatcttaatactgcctaaattttcaactcaagaatgggaaagatttttatttaagggaaaatgaattggcatacctttaattgttgagatagcttttaaaatatagcttttttttttttttagctgtatgtgctggatattgctagattcttccagtgtttgtgcttctctctgttgtaggaatttgatacctttgaatgctagttgagttgagattcttaacaaatgcagggagaagcttaaacatgtggagtctctcattcagtgactatgttgtcatgcattatattttataaataaatatagccccaagtcattgaagcaaaatataaagggaaagttttataattgttacaaatacaaaaaatgggcttctaaacacatttgtaattcttcataatgctgttctttgaaagcagtaatttattcaatgctaaatgagctcaattctagtgggcattcctttcttaaaagtataatttttaattatgaaaataataacatattacagagtttatgaaataaagaataaaaacatggccataattttatcaccataacaacccttttcattttgcattatttcctttttgcatatttaccttttgcatagttttacttgggtgcagagtttttatgtcatctttttcacttagatacatgtcatgcctatttcttcacattgctatgtggtcattatcacaataacttttcaaggttgcataatggcctctattgtggccatatcatagaacctaaatatattccaggtgttggagatttaagtttctttcaattttttaaaaatcataaataatgttataatgaacacttttgtgttcgtagcttttctggatcattttcttaggatatattcccaaaagtgaaattcctgtttcacacaatatgaccatagtaatgacttttgatatattgccagcctactttcccaaatgatcaaaccaattttttgcctccagcaatgtgtgaaagtgaagctttaccataccctggcctgtgatttctcatttttgttctattattagtgatccttgtattgttagcagtaaaatactagtacttcatagatgtatagaaatttagaaaacagttttggaatatcagacacctgagtcaaggttctctccacaaagaggaagaggagaactggtttgatgtttgggttagtcatgcctagaaggataggagaaaagctctccatggcttgttaaacacattagttgaagaaatttatatttgtctgaaattagtgtgtgtgatgtcatctagctgaccatttatacctccttagagaattgttttgcccttttattctggaagaaaccggttcacaaaaaaaccgctgcatttatttctttgctttctaagaatctaaactgatatgagtcttgcaacacagttttctgcttatgaaatattttggctttatcttggagaatcacataattccatttttttctttttctttttcttttcttttttctttttttttttttttttttgagacagagtctcgcccagttgcccaggctggactgcaatggctcgatctcggctcactgcaacctccgcctcccgggtccaaatgactctcctgcctcagcctcccaagtagctgggattacaggtgcctgccaccacacccagctaatttttgtatttttagtagagacggggatttcaccatgttgatcaggctggtctcgaactcctgacctcatgatccacccgcctcagcctcccaaagtgctggtactacaggcatgagccactgtgcccagcctgagccactgcacctggcccatttttttcataattaaataatttatcccttagaagagttaagtcatctactttcagatgttcctgcaaacggagggctttgttctggcattggtcaaccaaagctctaggtaaaatggctagaaccttcctctacaagtaagagtgaatagaggctttggaaagaaattcagtctgagacaagagctgagaaacatggtagaattttagattagcatgattttaatagtaatgggctgggagtggtgctcacacctgtaatcccagtactttgggaggaaaagtcaggaggatcacttgaggccaggagttcaagactggcctggtcaacatagcaagactctgtccctatttaaaaaaaaattaattagcctggtatggtggcatgcaactgtagtttagctacttaagaggctgaggcagaaagatcacttgagcccggaagttcaaggctgcagtgagctttgatggtgtaccagcttgggcaacagagtgagaccctgtctcttaaaaaaagtaattttttattctacagcactgaatagtttcaaaatatcttttcattcactgtctcaccagtgaagttagtaaaatgagagagatgattaacacgcagagaatttaagggacaaacccaagtaagggcccatgagcacaggatgagtaagggtgtgcctgtgtggtatggactggactgtacctaaggctttggctgcaaatctttgtctggttttactttaccacagaacagtatttttaacatctcctccttcattcatacaaaaatttattggctttccgctatacctgctctggcacaaatttcagccttccatgagggctcagtctggcaccagagtcaggtttgcaaagaggccatggtgagggagtgtggtgaatgctggatccccgtgagggaaggctgcagctcatgctggtggtgcaggtggcactggagccggatccctgaagggtcaaaaggggtgagccctgtggatttctttgactttcaccagtgagggtcaatgagattgttaagaaagcaaaacaacacagatgttgtcttgagataataatgtcttctatgggggctggaaggggaagactacttccttctactgcagagttgctccatgctgctttcttccacagacctactttgtatgaaatgctcccatttctcaggtgttttccttccttgatccccttctaacaatggcctcctgaggttccacattttcttttatgccagtttattcattttctcattcattaatccaaaagatatactgagtgctagaatctaatgagaaagagcagagctattgaaaatttgaagcaaggccaggctcagtggctcatgcctgtgatcatagc

SEQ ID NO: 316 - DNA, 4045 bp, Homo sapiens
ccatctcaaaaacagaaagaaagaaagaaaatttgaagcaaaagccttctgaattgcaaagaccatgaggaggaaatagcttggcatgttctcggaacagaaataaggactttgaagctagaaatgagggtgtattaggagatgacatcagacagcagggagggtccagaccttggtaggaagtttagaatttattctaagtgcaacaggaagccatgggaggagggttttaaacagaagacaggatctgatttatctatcattttaattttgtaatttagaaaattttaagaaaagtgcatgttagcaaagtttggtgcttgatacacggacaatttggataatggctttagattgaagaaaggttaggaaagagttgctatttaaagaaggggggtgaccccaggatttatttcacacccacatgtttgcttttctctgttcttagctcagtccatatgaccaactgctagtttaggagagaagggtttagcagggattcccctcttccctccaattctcttagaccctgttttcttattaaaagatttgcaggatcccatctcggtcagtgatgtcagcaacccagccattatggtgagctgatgccatgctcatgaagaaaatgaagatcagctgattgacttccaagtatttctgccctaagccacgccaatcacttctttataccgtcttatcttttaatctcttgtctttctcactaagttgtagcaggtgggagaaatgttccaagaccattaaaggaggataattgggaatctctgtatagacatttaaagttgaataagcagcagtttattcggctgcctggtgctcagaggcacaccagtagcatccaaagagcaccctgagttcgaaggagtcggagaggtgggacaggaggaagggtgtcttcaataaagtgaattcaggctcttagacattctgttgagaatggaaactgtgatttttagtagctacattctgatatttacaatcaggtcttcattaatctgccatttcacggcttcatttagtttaagtaagtatgtggaaggtacacaatcggacaagccatgagagactacattaccttcaatgtgtttattctatctgttttcttgagttgctttccaccttattacctctaagctagttacaattttttttcaacacacagctcatgtgtgtttgagaaggttgacctccctccctcctctgtgtatttattcataatgaggctccttggtaccccgtgtgtacctctttcagagatttgtggcacttaaccacgttctgggctagtattgttctctcttcccctttatactataagtttctcaaagattgagtttatagctgatttttgccttctcttatgcctaacgtatttttatatattgtatatatttgtactttaaaatttttattttggtggaaatctttgttgaaaaatctattatatactttaatgccacctaaggatgggagaaaatttgaatgttttcttttggacacaagataatcattgtgctctccagttgttatttttgactcttgaggtatttgggattatatctccttctactaaacacctcagagcatgcgacttctaaaacatgatttcagtattccctttgttgctgttgttgttgttttgagacagtgtcttgctccgtcgcctaggctggaatgcagtggcaccatcatagctcactgtagcctcaaactcctggagccaagcagtcctgcctcagcctcctgagcagctgagactataggtgcatgccacaatgcctggctaatttttgttgttgttattgagacggggtctagctatgttgcccaggctggtgtcaaatttctggcctcaagcaatcctcctgccttggcctcccaaagtgctgggattacagttatgagccaccacagccagcctcagttttcctttttgaaattattttgtatcttcctacttattctaactgatgctggtctattgcttggaggccaaaacttcactttatacaatttgtctgggaggggaattgaaggtcttttcacatatctactacaggctgagcatcctttgtgtaaaattcttgggatcagaagtgtttcaaaattcagtttttgggattttggaatatttgtgtatccataatgagatatcttgtgaatgagaaccaagtgtaaacatgaaattcatttgtttcagatataccttagacacatagcctgaaggtaattttatacaatacttaaataatttcatgcactaaagtttgtatacatttgaaccatcagaaagcaagagtatcaggtgtggaatcatttcagcactcaagtttcagattttggagcatttcagatttgggattttcagattagggatgctcaacctgtagaatgcaaaatacataagctttgtgacaggttgtcatgtaagagcacttttagctcaatggccaagccttgagccagcaagtagccagatatctgctgcatagagaagtatgtggttgctaggtgtctctcccatcaaccacaaggactctttccctaacttccttgatagaaaacattttaacagaagcaatcaccctcattcttcactcactcagctctgagagcaccaatctctaagctaggcatgcacttgcctcagagcctttgcactttccattttctctgcctagattgctcttttgccagatattctcatgccttgctccctcacttccctccggtttttttttttaaatatcgctgtctttcagatgccttccctgaccacttacacaaaatattaccaaccctcatcttcaacccaccatcctctcccactcatcctgtgtggtagatttttatagtaatgaatcatgcctccctgtgtccacactcctatgcagagggaaatttttgctcttttcatcaaaagataaagtacatttttccattctcttgaatctgttctggcttcatgacatgcttcaaacaatagactgtgacaccgtgatgtgcaaactctagagctttgctgtgtaacataggaacccttagacatatgtaaccatttgtatttaaatcacaattagataaaatttaaaatttagttcctcagctgtactagtcatatttcagatactaaataaacatatgtgactagcaggtaccatattggagagcaattagagacgacatagggagaaactgaggtaccccagacaataggcagtgatgatttccagacatgtgagtgaggctgttttgtcccgccctccccatccaagctgcaggatgactataacctcactagtaatcccaggtggtaccagccaaagaacaggtcaaattgccaacccacacaatcatgaaaaataattgtcattgttttaagctataagttttatataggtttgatacacagtcatgataatggaaacacccttcaattctaatgactgacagtaatttggaaaccatgccctaaggggttacctcatgggtgagaatgtcacaaaatgaggaagacagagtgaatccataccatccatgacagtcagatcagttccttatttatctaaaaagagaaaaggatatttgctattactaaaataaaaaccaactgcagactgaaatacttattaatagcacagacttagttttacatcaaaaaattactaccagcaatttgcaaagtagataatttaaaaatacagaactaactgaaatccattatttcagtttaagatgaacagattgggtgactttgttatatcttgctctgacatgttttgtaacattaaatacatagtatttaattctgagagcatttctcccataatttattatgctcaagcatttattgagtgctttctatatatgtctaggcaggtacagtagaggatttcagatgattaagacctgaaccttaccatgcaagaactcacaatttaatggaggggacagatgcatggtcaaaatatatgcacattaacacagtacaagctctgttagaggaataggaagtgctctagaaaca

SEQ ID NO: 317 - DNA, 4045 bp, Homo sapiens
tctctagacttgcctgtttgggacattgcatggtaatggaatcttacactatgccctttcatgtctagcttctttcaatgagcatgattttaaaattcttccatgttatagcacatatcagtatttcattcatttttattactgaataagatgtcattgtattatggatatatcacattttgtttatccattcagcagttgatggatatttgggttgtgtccatcttttggctattatgaataaggctactataaacattcatgtatgagtgtttatgtggacatgtttttctttttcttcggtatatacctatgtgtagaattgctgggtcatgttgacaactctgtgtttagcattttgaggacatgccaaactgatttccagagtggctgtgatatggtttggctctgtgtccccacccaaatctcactgaattgtaataatccccgcatgtcatgggagggacccagtgggaggtaattaaatcatgggggcaggtttttcccatgctgtttttgtgatagggaataagtctcacaagatctgatggttttataaaggagagttccccagcacatgctgtcttgcctcccgccatgtaagacgtccctttgctcttccttcgtcttctgcaatgattgtgaggcctccccagccatggggaactatgagtccattgaatctctttcctttgtaaattacccagtctcaggtatgtttttactagcagcgtgagaatggactaatacaggttgcaattttaccattccaccaacaagcatcaaggttcctgtttcttcacatcctcaccaaaagttgttattatctggaacagaactgttttgaatgaaaatataaactcattaaaacagaaaaattccaattatattatgttatatgcatttaaggtggcccatatatcagtcacgtgatattagaacttaaagctgaatgccactttgtagctctgtgtacaaaacagctcattggagtctaatgatcttatcattaatgttcaccaggtggttgggaaatgcaggttttcttttatgtctaattgagagagttaaagtgtgaaatgattatatgtataaaactgttgaaagttaaatctatttctgacatacaattaaatataattgaaataggacaaattgaataacaaaattaaatttacaaaacaggatatgaatggaaattatcatatgtatgctgctttgtaggatatttgggtggtgcattggcatgagggccagagccctgtatttgtacttacttggcatggttcccacctgcccaggcttgcctcctgtacttccctacattggcatatcaaaggagttcgcgagacattctccagccagcaccctgcgcagagaggatttctttttcttttttttttgttttctgaagcacggagtttaatgtggttaggaagcaaaatacaatctaagactcagacttgcttttaatgaatccaggagacctgacaatgatacattataaaaaacaaaaataaaaatctgacaataccccccaacttgtcagtggcttcccatagcccatgattgggttgagtgagtctcagtgcataggaagcagtgcagtggtctttgtggcctgacctccgcccacaccttcagcttcagctgctaccgctctctgagtactgaagtttttatagttccctgagggcgcacactgtgacactcctgcattctctgctagtgtttagtttcctttgctgggagtacctttccctctctgcaagactcaatttacgcaccacctcccccaggaagcattacagatcccccaaggctctactaggtcccagacatggcattagtctgggtgctttgtttaccatgctgaacaaaaacagaaaaagtccctggtctagtggagcttatattttatctaagagagggactaaacaagaaatatagaaatgtcacctcttttgcatagtagaaggtgccaggtctaggaaatacaaagatagttaagcagaataatgagaatgggaaatgtaggggatgagaaaggtggaatgctacattcaataaggtaggtgggtgggcctcaccttctagacagccttaaaaaggatgagggaatctgtgatatggctaaatctagggaaagagctttccaggcagagcaaacagacagccaaagagattactctattgtgagagtctccatgttaaacaaataaaattccatccataaaggaagttgataggttggttttccaaagtatcctttctatagaccaatatgtacatatttccatttcaatttttgaaatctaaaaagaagttccaagacaaatctctcctttgccctcttccctccccacacccctgcacaatgcacattttgtggactattaatagtctagaattcctaatcagaaattactgtacacctaagttgcacagatcatattgtcttctttctccaacaaaagatctggatttgcctgtaaaatatatgccccgtaatagttttatatttccagagggccagttctgcctctgctcttccttctctgagtcatttgcctttatgtcccgtcttctctcagtttttaatctttccacattattgcctattggtgttttctggttgatcttttgtgctaaattctaaatgccattgtgtgaattcttcctcctatttgataaaccagagtgaagacctgttctaagatcttcatcttctcttcagtggcttgcattaaatctgtacattcctggaacttccccttccccaggaagaaatctagcacaggccttgcacagcattttaagaatctttaccactcctgagccaggcgtggtggcccatgcctataatcccagcactttgggaggccaaggcgggcggatcacaaggtcaggagatcgagaccatcctggctaacacagtgaaatgccatctctactaaaaatacaaaaaaattagccagacgtggtgatggggccctgtagtcccagctactcaggaggctgaggcgggagaatggcgtgaacccaggaggtagaggtgaaggttacggtgagctgagatcgcaccactgcactccagcctgggcaacacagcgagactctgtctcaaaaaacaaaacaaacaaacaaaaaaacccaacaaactactccttgctgggtgtggtggctcacagctgtaatcccagcacttgggaggccaaggcaggtggatcacctgaggtctggagtttgagaccagcctggccaaccatggccaacatggtaaaatcccatctctattaaaagtagaaaaattagctgggtgcagtggcaggcacctgtaatcccagctacttgggaggctgaggcaggagaatcacttgaacctgagaggcagaggttgcaagtgagccaagattatgccacttcactccagcctgggtgacagagtaagactccatctcaaaaaaaaaaaaaaaaaaggaatgtttactgctcccatatttactgatttgatttggattttggaaatatcttgaccactaaaattaaaaaaaataattttgctatattacctgctggttttcactattttttaagtaacatgatttttcatgtcgttattatatatttttaggtgattatggaagtaaatgctaggaatatttttattcctctagagcttcttgctctaacaacataataatctaagttaaagaactggctcaagacttgtaaatgtgtatttttttggattaaaaatctttttttttccatttttcttgtatctctttttatttccatatattaaaactttaagtgccagatgtatataatctttttttttttttaatttcctgaatgtcacacatcctgcgatttcttcacaagctgcgtttgttaaataggagatgatggaaggtttgttatccccgcccccacccaccaacatagtcatttaatgctcatcagtgataattgctgtgtgaatttagttgatttgtgcttgcttcgctgtcagtctttggttttatggatctaggaagga

SEQ ID NO: 318 - DNA, 4043 bp, Homo sapiens
ttttcttgtatctctttttatttccatatattaaaactttaagtgccagatgtatataatctttttttttttttaatttcctgaatgtcacacatcctgcgatttcttcacaagctgcgtttgttaaataggagatgatggaaggtttgttatccccgcccccacccaccaacatagtcatttaatgctcatcagtgataattgctgtgtgaatttagttgatttgtgcttgcttcgctgtcagtctttggttttatggatctaggaaggacatataaatgtacctttgcattttagagaaagttttattttatcctatatcctgtgttacatcactatatcttaattgtggattttttggttcactttgctcgttcatttaaattttttatcaaagtaataattgtatagtttaaaaatcaaaataatatttacaatgcttacacacaaaaaaatagcatttttgtcactccgtctctcactagttcttgtcagctcttctcatccctccccacctgtgagggttaagctacactttggttagtccaagcacactttccagtatgcttaccatgttatgacttatctcctctatacacgagtaggaaaattatcagtaatagtggtttctagagtagtacttgaggagggtaacgggtggcgtgtgcatgcttcatggccttattcaatcaagcactctactcttgatttactgctaaatcctccttgaatctttagatttcctaaaggctatcatgagattttctggatatagaaaatgtagcccattagtctctgtcagcttcattaccagggtttttttgtgtgtatgttgcttagatccatatttttatataagataattattctggtatttctagattttttcattcttaccttttattgactatggaagaaaaggatctagcctgcaaatactgtagcatctcaacatagtgatgtcaaatactactaaaaatttagttgtcttcaaaaggaaagattttattcattctaacatataatgaaagttcagtattttagaaaataaaagtctgacttttcataataggttgccagggaactacaccgaaggcaaaatactagagccagtaggtggttatgtgtttaattttaagaggataacaacattaacaaattccatttggcaacagcgttaaaattgcacctgggaaaatcttcattactcttatcttgcagcagtcactgaaggagtttggttgtttttataggtgcaggggtgaaagtttagctccacttcaaggaacaaaggtgctaaagagaaactattctgagaatcatagatttgcatgaaaaacctcacaaaagaaaaatagtaattgcctcagcatgagagatggaacatattttaagataattggagactgttttatatgtgccctcattggtttatttttgatttcatgtatgtactttgtttctatcgcttcatttttttttcttaatgtattctaaataatgtaaaacccttctgaggatcttattgctacttgtgaaattacctttctctgtatcattggatgtaatttttttgtcagtcagtcttacaagaaaaaagtatcttagcaaaggctattatattttatcaatctgacatcagtgaaaatcctaaaagtacattttgtgtaaattcaaatacactgtaacaatttcccttaagtgaatattttaaagctgtttctttttttgtatacttaacgtttacagaaattatcttttttcctttgtatttttcttcattcatatctataaaatttacattttggcttctaacttagctgaaatgcttgctattagtcattttcttgctaagtgtggtcagaagtggtatagttgaagatgtcccataatttggtgaacacgtgaggttacaaactcaacttttgcttctcttttgaaaggccctgagacgggagttaaaggagaaagaatattctgtcctgaatgctgtcgaccaggcccgagttttcttggctgatcagccaattgaggcccctgaagagccaagaagaaacctacaatcaaaaacaggtgagactggtttctccactacatcataaaaacacatgctaggagaacaaaaaacccaaaatcaagtaggaaatttccttacagcattttaggatctaatatttaaatcttttcttctaagtgttactttattcaaatatgtcattaattcacagatatctagattcttaaattaagaaaataaaatttttgtatacctcaatatcaattttaaaggaaattaactgcagaaaaaatagattgtctaaaaagtgtactgtaactataaaagtaatttctataagaaataaaaatttatattatatttaaacaagttacatgataaataattgcaagtagtagaaagttattaaaatataataaatatacaaaatatttcaaggtctataagtaagattacttttgataatgacacaccaaagtcctttcttttacaagcagacaacatttctttaatttaaaaataataccctgtgtgtttatttactttggcttaaaatttaaataataactaccttactagcaaatttactagcaaaaaatatatatttcttatatttaaacatgttatgtgataaataattgcaagtagaagacatttattaaaatataatagtaaatatataaaatatttaaatatctatatgtaaggttacttttaaaaatgagagaccaaatacttttcttttacaagcagacaacatttgtttaatttaaaaataacctgtaacatttatatactttagcttaaaattgaaatagtaactaccctactaacaaatagcaatatatcacatagtaaacttaagagaaaatgtgtaatgaattctgggtccaatatatatctgtattgtgatttttcactgctgacaataaaatcattctgatgcatttttaaaaataaacatgccattcaaaatcgtttttcatcattcacttcacatagtaacagcaaacctgaaagattgcctcatgctgtgtccagcagtgtaaatcatgaacatttattacttgtaagggaagcatagttagaaaatgctttctttgactataactggaactggatcagacatatggacaggtagccgttttcctactgaatcttactcaaggaaccttcttcagtccgaataaatttcccatcaagaccataatctttttgactctctgaaactagttgtatatatgtgtgtgtgtatatacacacatgtacacacacacacagcacacttaacttgtctagcatttctttttgttttctgctggtggtaacactgtctttccagttagcctcctacaaagctaagtcattgttgagtcttccacttttcaccaaatccagtggtctacaaatcactcataattattatttcttttctttttctttttttttgagacagagtctcactctaccacctaggctggagtgtagtggtgcgatctcggctcactgcaatctctgcctcccaggttcaagcaattctcatacctcagcttcccatatagctgggactacaggtgtccaccaccacgcccagctagttttcatatttttagtagagacgaggttttgccatgttggcaaggctggtcttgaactcttggcgtcaggtgatctgcctgcctcagcctcccaaagtgctgggattacagacgtaagccactacactcagccttatatttgttatttctatctttgaagaattattccttttgagtactctgttttatatatatatatatatatatatacatatatatatatatatatacacacatatatatatatatacacacatatatatatatacacatatatatatataaaaaatgtatacacacacacgtacatactcatgtgcacacacatactgccattaattccacattctcagccttttgtgtgtagacttagaatagttttaggcagaatctgttgctacttttggtagcattggtcccattgcatt

SEQ ID NO: 319 - DNA, 4042 bp, Homo sapiens
tttaaaaattattccagttaaagaattactgttactacaactactattttatttaagctgcctgaatatcatttctgtttcagcctggagcagtcaattttgcttaatttaaatattttattaataatcatagaaaaacccagctattacttaatttagtctatttgtgcatgtatagttgagtatagtgggtatagttgtgtatgtgtgtatgtgcatatacaactttatatagttgtgtatgaatgtatatgtgatgaatagttaataataatttttcagatgaaaaagtatgtatgggttaatgttttcctctttggtcctttgacagatggctatgtatatttagtacataatatggtatgtaatatttaactcagggtatactgtttaatttttaaatatttcctgatattttagaaagccaagtattaagactatttttcttccctgtaaaatctcatatattttgtgatacaacgaagaatttataagtgacatattcagtccactatgtcagtccactttatgccagtattagcaaacttatgcaaatacaatttcatagttattaaatgagtgaagatttgaaattattatatagtttagtagaagttacttttatattctccatataacttaaggttacaacattattttcttgtatgtaataaaatgaggacaaattacacattagttaatagaagtaactgggctagtaaaactaatgggtgttttctcccagggcttttgttttcctcactaacaactttattaattggagcctcattcattgtaaatgacaggcacacagcttccctaagtgtaggcatgaaggggaaggcattggcctccataaccgagccacggtagagacgtagctgaccacagggactggaataccacccagaaggcttttctccatgtcttcttctctgcttctctgtacaggttttcattttcttagctttcctatgactgtatagctcacaacctcataccaggaagggctcacccttctttagatccagaatattccaggagagggctctggttgacttggcccgagtaacatgggactcagggactgctaggattggcagaccttcttcataatatcatgctaaatggaggaagaatccaatcccataaaggaaggggaaagtgaaaaatggtagtaaatgcagacattcccaacaagccagaatttcacaggtgctgaccatgtgccacacactgtgccaagaaacttacctaccttgtttaattgcattctcataataattccttgaagggtgaatacttaccacccattctacagatgaggaaactgagagtctgagaggcttagaggcatactgtcttctatgtgacagagccaaaatacaaactaaggcttatgtcacaaaacttgatgctcttaactgccatagtgtactatcttaaactacttccgtaataattagtatttgtagctattcaatagaaacaacattttattttcattttcttcgattttaaaataattcacacagtaattgaatatgtttataactctttgcttttttctttattgttgctctttcttcactgaaataccacgctgcataatggaatcataaacagttcactgatttcctaacaccgagggagaaggtgtctaggcaatattagactttgtctttttaattttcatataaaaatttgaagtataagtaattgctttcaggcctatagaccacgacaataatttcattagcttctcaagtccaaattagattagtaaagttgtaatgcatgaaaaagcgcagaaaaatataatgttactttcttttccggtgttcttaactacagagcagtaatgtgatttttcacaaattaaagttctataatatctgtatgaatataatgcatctagtcttcaacttttctaaaatacaacgagccagctgagtaagcccatcgattgggtaaaaatttggaaaatgtttttcatgctaactcctactgtagtaataaaatctcatttaaataaacaatagtcttcatgaagaattatatgataaagatttgtttgatagacatagcattttcaattaattgtttaccatctgttatgttctctaatcagtgttacagccattcataaatcacatttgcctcataaaaagatggcaatcgtttacacgtgtgtattttattataatcagcatctgagacattactttctgatttaaacataaaggaccggaggatacaagactctttgagcgtggtataatgtacttatgttttgtgattgttgttgttcttagtagaaaactggaatcttccaagaattagaggttttgccattttttaagaagtataatcctagcaaaggcatgaattctcctcttcaattaaactcatcacttattttggcagtacataaacataagccatatttaacttataagaatggcagagcatgggtagaaagctccagacttctctgtagctcgatcaatcactaggggctgtgtttagctgggaagcagcctggggagagatgggcagtcatgtggcaagaaataaaagactttgaatctaaaactcctgtcctttgattcttgaaagagaaaggggagaattttcttctttattttctttttctagttaaagatattgtacagagattgatttatgcatttaacaagtacgttttgagtgcctaccatttacaaggggggtgttctagatactcgggatacagtagtaggcaaaacagatgtttttttcctcctgaaacattctcagcttttcctctttccttttattgccacctgcctgcccccagtgacccatctgttgatgtccagcccaaaggaattcacttgaataaatcgcaaaactgccactacttggaggaaattcagggattattcctgaatgaagaaaatggaaagatctcaggttgcttagcgaggccctggttgtctgttccagggtctctttgctcttcctgcttctttccttggagttgcgtctgtctagtggttggcccctgcttcttcctccactcaactctgggcttatttactttggccacttcacaagaagagtaaaccttgaatgtatttagactccagttctgcctctattgacttcaggtcagtggtgccatgtagctccctccaaagcgtgttttgtattctgagttccccttcatttgtgtcccctctcttaataacttgcatttactatttgtggaaggtagtccctaaatctgtttacttttgaggtcttgatgttccctaaatatatctaggttctcttttcttaaaaaaagaaaaaaaaagaatttgagaagtccactggcagcatggatgaatctatgccatctttatcatatctgtattgaaagatttaggctacatattaacaggtgaatctgctctgagtagcctcttgttattgtcatccttataatttattaaatggacataattagaagcactaatcagccgtggcacttgatgatgtacttgtaatctggctcataatgagtggttgtcatcagttattgtacagagtaggaaatggtcagggccctctcaaacactgattgaacatttcagagttattaaatggatcttaatcactttatcagaaaattaggaaataatgtatttcccaatattttaatcagaaacatcttttggtcatgaggaaagagagagagaaataggaggggggtaaagagagagagatattgagagagagcaagtcaagtcttttcctttgagttcttattggctaatcaacctggtttgcttatgtgaaaatctctacagatatctaagcctcccagagctagttataaaatagtaaaaaggaatgaaagagtaaccttcctcaagaacctactgtgtgccacacatgtgccagtagctttctatgtattaactgaggttgaaagagataaggaatatatctaggattatgtaactagttagtattggaactggcatgcaatctcctaatcttttcttctaccaaa

SEQ ID NO: 320 - DNA, 4046 bp, Homo sapiens
ttagactttgtctttttaattttcatataaaaatttgaagtataagtaattgctttcaggcctatagaccacgacaataatttcattagcttctcaagtccaaattagattagtaaagttgtaatgcatgaaaaagcgcagaaaaatataatgttactttcttttccggtgttcttaactacagagcagtaatgtgatttttcacaaattaaagttctataatatctgtatgaatataatgcatctagtcttcaacttttctaaaatacaacgagccagctgagtaagcccatcgattgggtaaaaatttggaaaatgtttttcatgctaactcctactgtagtaataaaatctcatttaaataaacaatagtcttcatgaagaattatatgataaagatttgtttgatagacatagcattttcaattaattgtttaccatctgttatgttctctaatcagtgttacagccattcataaatcacatttgcctcataaaaagatggcaatcgtttacacgtgtgtattttattataatcagcatctgagacattactttctgatttaaacataaaggaccggaggatacaagactctttgagcgtggtataatgtacttatgttttgtgattgttgttgttcttagtagaaaactggaatcttccaagaattagaggttttgccattttttaagaagtataatcctagcaaaggcatgaattctcctcttcaattaaactcatcacttattttggcagtacataaacataagccatatttaacttataagaatggcagagcatgggtagaaagctccagacttctctgtagctcgatcaatcactaggggctgtgtttagctgggaagcagcctggggagagatgggcagtcatgtggcaagaaataaaagactttgaatctaaaactcctgtcctttgattcttgaaagagaaaggggagaattttcttctttattttctttttctagttaaagatattgtacagagattgatttatgcatttaacaagtacgttttgagtgcctaccatttacaaggggggtgttctagatactcgggatacagtagtaggcaaaacagatgtttttttcctcctgaaacattctcagcttttcctctttccttttattgccacctgcctgcccccagtgacccatctgttgatgtccagcccaaaggaattcacttgaataaatcgcaaaactgccactacttggaggaaattcagggattattcctgaatgaagaaaatggaaagatctcaggttgcttagcgaggccctggttgtctgttccagggtctctttgctcttcctgcttctttccttggagttgcgtctgtctagtggttggcccctgcttcttcctccactcaactctgggcttatttactttggccacttcacaagaagagtaaaccttgaatgtatttagactccagttctgcctctattgacttcaggtcagtggtgccatgtagctccctccaaagcgtgttttgtattctgagttccccttcatttgtgtcccctctcttaataacttgcatttactatttgtggaaggtagtccctaaatctgtttacttttgaggtcttgatgttccctaaatatatctaggttctcttttcttaaaaaaagaaaaaaaaagaatttgagaagtccactggcagcatggatgaatctatgccatctttatcatatctgtattgaaagatttaggctacatattaacaggtgaatctgctctgagtagcctcttgttattgtcatccttataatttattaaatggacataattagaagcactaatcagccgtggcacttgatgatgtacttgtaatctggctcataatgagtggttgtcatcagttattgtacagagtaggaaatggtcagggccctctcaaacactgattgaacatttcagagttattaaatggatcttaatcactttatcagaaaattaggaaataatgtatttcccaatattttaatcagaaacatcttttggtcatgaggaaagagagagagaaataggaggggggtaaagagagagagatattgagagagagcaagtcaagtcttttcctttgagttcttattggctaatcaacctggtttgcttatgtgaaaatctctacagatatctaagcctcccagagctagttataaaatagtaaaaaggaatgaaagagtaaccttcctcaagaacctactgtgtgccacacatgtgccagtagctttctatgtattaactgaggttgaaagagataaggaatatatctaggattatgtaactagttagtattggaactggcatgcaatctcctaatcttttcttctaccaaattgtccaacagtaaaaatgccagttgtgaatttttttctttacttgattgttttaatatttccttttcgtcttttggtagaataaaacaataagattatagatacatgcaaaaaagcaaatagtataaataaggtatttggaattaccatacctgaaatgactttgtaaggttgatccttctatttcacaatagtttttttgtaagtgctttacacagatgtgagaaggaggaagaaaaatgaagtgaaaatatgtccacttaaaagtgtaaagttgaatgttctcaataaagaggagcactaaaaattcaattccgtccaactcaattaagtaattatatactgaggacataccaatctctagactggctactataaaatcaatatggaaggaaagaaaacattcttgacattgggctttaaaacgtaagtgtagaaaagccacaatggagattacaaatgttgatatcataattgagaaaaaaacaccatacatatgggaaatgtttattaaacaataacactgggcgaattctaataaatatctatcattatttcatgggagaaacatagtttcatttttaaaatttaaaaaatagctttgcataagcactcaaaggaagagttttttttcctctactatcaagatttctttgagatatacagaggctcaaccttcttacataattgaattgaggtaaaatagactcttgaaataaaatatttttctagcatgagaaaatagggtttgcacttgataaaattgggctgggcaggtcaagtaactggcctaggggcaatgggcaaaatgggagcaggactgattccaaatcctagtctctgttcctggtccagctttggtttttcacctgcattctagggaagtgtattatagtcttcttcctcatggtataaaggagagcgtggcataaatgctgtgccactaatttgcatatttgaagaagtaaaggtaattggatgacagaaaacatcaggattgatctttcctttttcctctcttcctttgtcttcttcctgtttcttctttctaaaagatagttatctgtggtcccttaaatagctttgtaatgcaataaataaattggtgtttaaaaattatgaaatatgaatataaaataatattcataatacatgatacataaatatataatataaataaatataaaagtataagtaagaggctaggtgcggtggcttatgcctgtaatcttagccctttgggagactgaggtgggaggatcacatgaggccagaagtttgagaccagcctgggtaacatagtgagacctcatccctaaaaaaaaaaaaaaaaaattagctggccactgtggcacataactgtgatcccagctactcagaaagctgaggtgggaggatcacttgagcccaggagtttgatgctgtgagccaggcttatgctactgcacttcagctggggcaacagagcaagaccctgactaaaaaaaaaatggtgtatacatatatatatatatatgtgtgtgtgtgtgtgtgtgtgtgtgtgtgtgtataaaatttttaaatatatagatatataaaaattatgtataatatatacataattttacttatgtataatatatacataattttacttatgtataatatatacataattttacttatgtatattat

SEQ ID NO: 321 - DNA, 4052 bp, Homo sapiens
cttaaaggtataaggatttaaataaagtttgtctttctaatgatacactggccttcagagagctgctttctcaagaagcctttgcaatcctgacatgttgcatgttttagggcttttctctgggctcctagacagttacttgaacctgtttctctaattcacttatttttttatttttatttttatttttttgagatggagtctcaactctggcacccaggcaatggcactgtgtcggctcactgcaacctccatctcctgggttcaagcaattctcctggcccagtctcctgagtagctgggattacaggcacccaccagcacacctggctagtttttatatttttagtagagatggggtttcgccatgttggccaggctggtctccaactcctgacctcaggtgatccacccacctcagcctcccaaagtgctgggattacaggcatgagctgccacacctggcctctaattcacttatgttctttatttatcttgtactggtatattcagcctatctaccagttgtgatgttttctcttcttccttcagttcagctgccaagagatttctgaagtttcctgtagacttccaccacttaagcagcacaacttgtagttctgcggttgctaaatatcaatgtctagaatttttttgaaatttagagagacaaacatatgtgttctgtcacctttgacttggcttttatataatatttaaataaagcaggcagaccaatttacactgaggatgaaagttacagtttaggagagcttgcttctgtgcattttatggtgaagttcatcttatgatgatcattttccaagtgatttggaacattttgaggtgaagtggaaattgctaatgtgatgtgtactgaaagatgagatgttatcacaaagaagaatgtgttttctgtctcaaattaatgtacagtttatgtcaattgcactgcctctttatttgcagtggacagttggataccaccatcaaaccagctagataggaaaggaggtattttaaggtgtagaagatagtgaggccccaggagtgtggagccatgctggagacctttctaagctgtcttgagaatttctcctcagtgttgactgcattcctctgcccttgctttaccagctccccatctcttatatttctgacccttggctttgaacttgactttgatttctgtctgtatcctttgcttctcctctggactgttccagcccacatcctgtggcctgtccatgtgttatgcttgctatttttatctgaaactctaagtttatttcaggcattgtggaagcccccttgctctattacaaacttaggatggtccttgaaatcttgctatcttcctgctaaaatgtctgtgggctgcagatgatgccctttattaaaactaaactgctaaacagccttagagagatgatcactatctaaggtatgttatttgtcttcagtatttatttttaggaacacaatacattaatcttattttctgagagtttttgcttataatttatagtcattcttcattaattatacttaccatttctcttgagaatactgaaatgaaaaagtgtctttggattttgtgtaactgaatttatgataaagaaaaattggtttatttcttgtgttatcttcttacatttcagtggctttagaaatatattaaagttcaaaaaccgggtcaatttattaatctcagtaactgttttattatccttttgagtgtgtgattaaatgtagcagagaattcatggatgaagtatggagaaattctttcttaccctggacaatttttaccctggagtaattttttcttactttttctccgtatttctcagtaacgatggtaacactcacacttggctattaagaatatataatcagacatccaaattattctttttcttttttttaatcacagaattaactcctgaggagagagcccaaaagattgccaaagccatgcgcaaacagtcttctgaagtcaaagaaaaatgggaaagtctaaatgctgtaactagcaattggcaaaagcaagtggacaaggcattggagaaactcagagacctgcagggagctatggatgacctggacgctgacatgaaggaggcagagtccgtgcggaatggctggaagcccgtgggagacttactcattgactcgctgcaggatcacattgaaaaaatcatggtcagcatcattgtctttgaaggatttttaagaaatgttttcttgttaaatataacacaaataaagagagccacgtatataaattgttataagggattgttacaaagccaacgccgctgcaaccccacccatcaggagtcaggacaggtgctttccatatgaccctcattggggttcattggaaccccctgcccccaaataacaactaatgcaacttttatgataatttacatttatttttattttttatccaactgtgcatctctagacaatgtagattaggtttacctatttttaaaaaatatttttaatccccagatttcccctctcttcctttttccttttcagtttatttgttaaagacactgaattgtttgttttgtattgattcccagagcctggattttgcagaattgtgtccatatggtatagtctccaggttcctctctactcggtatctcttgtaaattggtggatggagatagagatttaatcaaaagcacactcttttactgggaactctcatctataaattgtatcttattgtatattaatgaagaattagtttagctataaattctgtttgtagtaaggaattgcccaaagctatggatgttagacttatggttacctcccctttggttcccatattctagaacatctcctgaaaaaaaagttaataaaatttagacaataagagatataagagatggtttaaagtataccccaaatctcattgacagtgtagtcagataaaaataagtactgaattttgctaaatattattaaatatgtcaaaacaactggaaaacgaaatccttgggggtaatcaaataatgttaactgcctaaaattatcattaatcgttcttatttacagaatacacaccttctggcaggagaagggcttaggagtcacacctgccaacagacttccagttagcacctttgatactagcagatgttctgtttttatggcaaggaaggccacatagtcttttattctgttataggaaagtgcagtcataacatgataaataggttctttatgctagaacacacagcagttctgaaaccattttaaaacttgctttatctcgagccccttaatttggaagctcttcaaaaacaaaagataaactttcttgatagaaagactcctcattgccatataacacctgaccataaaaagaaaaacaaaaaccaaagaccttgtttgtcaaagctttttaaatgttttaacctgtggcttatatagggaaacattatttttggagaggaaaaatttgaatttcttttttgttccaaaagatttttaaagcctgtcttgaagttatattctatttgtttaaagtttactatcttttgaaataaaataggctattatttgaaattatatgcatctcaaaacattttctggcatttcatttttaatctttaatagataaaaataaaaagatgttgattttaaaagctaattacagttcttgagtcctccaaggtacctacccatggagagaatattaatgcatatagctaaaatcctgactaaagaaaccttgaaggatttgaattctgtaattgttctcaaactgaatctgagagacccagaccttttcaaagttcagactgaaaaatccctttgcccaccctaacccacccctcctccttccctgtgcttctatattaattgtgaattttttacacttataatgcctctattaccatacaactgctcttcttatttaattgtatttgtgtgtttttctgtgtgtgcacattctgtcatccattaaaatgccgaatctgcagcaatggaaaaaaaactatctcaactcttcttctcct

SEQ ID NO: 322 - DNA, 4046 bp, Homo sapiens
gatttttaaagcctgtcttgaagttatattctatttgtttaaagtttactatcttttgaaataaaataggctattatttgaaattatatgcatctcaaaacattttctggcatttcatttttaatctttaatagataaaaataaaaagatgttgattttaaaagctaattacagttcttgagtcctccaaggtacctacccatggagagaatattaatgcatatagctaaaatcctgactaaagaaaccttgaaggatttgaattctgtaattgttctcaaactgaatctgagagacccagaccttttcaaagttcagactgaaaaatccctttgcccaccctaacccacccctcctccttccctgtgcttctatattaattgtgaattttttacacttataatgcctctattaccatacaactgctcttcttatttaattgtatttgtgtgtttttctgtgtgtgcacattctgtcatccattaaaatgccgaatctgcagcaatggaaaaaaaactatctcaactcttcttctccttccatactgaagcaattcccatgaatttgtatgcatcccttcctctaccctgtctttgaaatgttggtagctgcagggttcggtaatatttcttactttacacatgttgacttcaaacttccaacattcatagttctcaccctgactctagtctcttaaagagacttaaagagcctccccacttaaagagtggacaatgtagaaatgaggaaacctgagggcaaagctaatgggatgtttacaacacctactacttctaaatttagtttggtacattattaactataattttgtggccaatttaaatttaaactgttttcttttaatatcccagttccattatccattctgtgttagcttaatattgctcaaatatcatttttgtgggcctttgtcaatagaaattaattctgtctctcttggattgcaagttctgtgctgaatagtgagggtctattcccaagcagcttccattctttactgggaacgtcaagaatgtggatgctcataattacaatttctaagtgctcttagtaagttgttttaatgattctagaccttgctcagaggtggcatttgtcaattctaagactcatttaccttttttctgtagactccactcttcctgcccaagccctaaccacagacagtgattataaatgattttgacagggatagatcttacctcttgagtctgtaataggcattggtttcatggttaggaatgttgtttctactggccactttctaatttaattttaagtggaaacatgttaaaatcaagttgttgcatttggtgaaaaaatattaaggtagctatgttaaaacagaataaaaagaaaacacgaatacaaactaaagatagaatcaacattagatatcagtaaagtggaaaataatggcatacattttccagagtaaactgcatataatagaaagcatgaaaggaaatacataatcattttaaaagtttgaattataatttttctcttcacacatttatttatatttttgggtaataaacaatgactttttggttcttcatccaagttactgaagacctgaattaagtcagctgttgttgagtgggcaactgtagttgatttcctctgagctggccttgccatttatttggaagtacaattccaggaccccgcatgtaccaaaactcatgtatactcaagtcccacatttccccatggaacctgcatgtaggaaaagtcagctctccatatatatatgggtttcgcatcctgcaaatactgtattttccatatgtttggttgaaaaaaatctgtgcataaatggacccaggaagtttggttgagaaaaatctgtgcatatgtgaacccatgcagttcagacctaagttatttaaggatcaactgtattagcttttgttatattcgtttccaataatatattttttgttcttttcttctaggcatttagagaagaaattgcaccaatcaactttaaagttaaaacggtgaatgatttatccagtcagctgtctccacttgacctgcatccctctctaaagatgtctcgccagctagatgaccttaatatgcgatggaaacttttacaggtatcagcttattccccttcataatgcaggcttacaccttgggtggtctttaaaccctacctcactatattaccactcaccgttttctctttctttgctgatggtatttgataatgaatttagcatgtgatgacatcaggtatttgtctttcagtatcttgaacctaaaggcctcatttatttatagagtttaatttaattttttgatgtactattcatatgatatttgtagaaaattgcaaaaggttaaataaatcacagtaattgaaacctgtggtaggtcacagaaacatttttcacataatggctaataaaggagtcatttttcttactttcatcatgtattttttttttcattttgaaaaatcaggaaagtctctattgtttttcttctaactggttgctatttaaatatcttccttattttttccagatagcacatttataccagtggtgtttacctttagttcttagattttagctaatgcagttggtttaatgactctagaccttatttaaatatgcaattttgatgtagcacataaaaacatttgagagatatattttatctataataggtttgctgaattaattcaaatatcaaagcactcaatggttcatattttcttaatgaaattgaagaagtaagaaattagtgtacaatattttacaatcttagtctttgcaaagagtgttaataacctaggattagtaaagcaaaatctgttaaatttatgtgtttttctagtggatggaacatagaaatatttgttctttattctttttttttcttctgctctgtttctctaattcattatcttcatgtgatgattcttatggtccatcttgatttacttcccattctatttctgttatcaccatttccgaagattagaagtcggggaatatgttatacttgaaagaagatatgtattctgtcatccttatctatgatcctggtaacctctagagctcagatgttagttgctggttggaaaagaagagaaaaatctatgctggtgggcaacactgttgaattgcaggagtaatattttctttactcataaagtgtggcatttgaaggcttttaggccttaatgaacaaagtgcatactaatgcaatttaaatagctagccaggaggaactagtgctgtccagggaatcagacatacacagtttcatttaaggacagctgcaaatgagattgtccctctaagtggaacagtaactagcattacatgaccaaggctagaaaaaggaaatggaaatgtcagtaggctgtgtgcagttgttattgatttgcatttagtttctcagtttagtaaccctttacattttcataatgcagagaactaactatagaatgtgtatttttaaaaggctaggcatgggggctcttgcctgtaatcccaacattttgtgaggctgaggtgagagggttgcttgaggtcagaagtttgagaccagcctgggcaacataggaagagcctgtctctacaaaataaaaattaaaaaattacatatgtggtgtggtgtgcgtctgtagtcttagctacttgagagactgaggtgggaggatcacttgaggctaggagttcaaggttacagtgagctatgtttgtgccaccgcactccagcctgggcaacagagtgagaccctgtctttaaaaataaaacaaaaacaaagatgtggataaaagatgtagagtgtccaacctgggcagcatagtgagaccttgtctctaccaaaaaaaaaaaaaaaaattaacccggcatgattgcacatgcgtgtagtcccagctacctgggaggctaaggtgggaggattgcatgagcccaggaggtcgaggctgcagtaagccataatcgtgccactgaactccagcctgggcaacagagtgagactctgtctttac

SEQ ID NO: 323 - DNA, 4047 bp, Homo sapiens
cccacccctacctcaactccatacagtttttctgtttcacaaaccttagaccttaggtagttaatctttggtatacgccttcctggaatatactgtgtacctagatgccaggacacatttttaaagtccagataccatcaatgttgatgaagtaaataggtttgctgtatacttattagattattaagtattccagatttctaaagctcagtttttcaaaatgtaaagctatgtaccaagaccaaatgaaagaggaatttacaaaataattgagactgtctttacagttctaactatcagttatctttaatattgatgaaatgctatactttcacctagcaatcactctcatagtggaaatcaagcacatattcttttggaagtgaaatattgtgaaatttatacacatttttgtaaaagtcaaatacatggccttgtattatctaacactgagaatccaaggaggtagaagttattcaaatcaaaacaattattaaaatgagtggggaagtgtaaacaaagtcccaattaatacatttaataattgttatcctttgctgcttggaatctttggctttattatatttcttggacttcagccatggttataaaagaagcctgtttagttaggcacaaaataaaaactgacctattagcctggtgccaacactgaaatgaggttggctctaatgagaaatgtaacatacctacttcctcattttcatccctgtttatactttggtgggcatagattgagaacagagtgcttgccttttataaagagaggaggaattgttgagtagaagaattgctcagctagtgttcagaaattgagatcacatctgagctcgaccgtttatttactggctgtcactctttgggcaagttattttatctctacacatttagttcctcatctatcaaatggaactttaacgtgtatcttgctggcttccttaccgaaaacatatatttgaaaatgcttggcaaagtttagaatgctgaatagttgtaagatattaatgtgacatgaaattgagaaaaaaagtattggtgacaactggctacgtgaggatctgatgatatttgcaaagtatgaaaattccaagtattatttgaatttttatatttgttcatttagcaaaattcttttatggcactaaattcacatgtactattcttcttaaataagtcttaaaataattggttaatgtaggaataatatattttttataagtaagaagtaactagaattgtaaaaaaaaaaaaaaaaaaagtacctcaatttaaaaaccccataaaatctcagtcatagtaaggtctagtgcaaaagtaggagactgggctctctgtatgtttcagatgaaagtaagaaattgggatttttctgcctagacgattgccttggttcttcacaactttttgcctatttttaaattccttctttttaaatgttatagaattgaatttacttaaatgccatctgtactcaatagctactcctgtgactacgatgcaaagtaaacaatgttattagtcatctggaaaattcggtcttgaaaaatctaatttttaatctggatataccaggtaaaattaattttggttttagctttatcaaaaatatatatggagtacagtttccagatggcactaaggtttaaactgtagtatttataagcaacaccatttgaaagtttaaaagtatttttatcaacaggttagattagttggcattagaccttgaacctgtattgtttcttgttttacttcaaatgaatccttaaagccattttttgtttggcccagtggatctcataattataggaatccagctcagaaaccagagcagttcattgaatttgctataaaatgttcagttgttttgcattaaggtgtaaggctttttggtttccaacgtttccaataatctccctttgtttcctcagcgtcagtccagctgccgtggcaaagatccatttcacataataaagtgccctattacatcaagtaagttgattttaattctcctttatgataccaagaaaatcatgttttattgataacttaagaggcttctctccccataacttttaaaaatagaattcagtcctattatctgaaagaaactgtgatatagttaatattaaaaagaaactacttttaacatgagaattatatttttcatgtatcagattagggatataggtgtgtttagctgatatattttaaagtagagatttaaatatttggagacagacaataagctatgatggccatactgtattccagcctggacaacaaagcaagatccagtctctaaaaagtaaaaaaaaaaaaaattggagaaaaatgacagaatttcaaaatactcttgacataatgatatttgtcaaattgtacaaattctaaaccatttttcttcctctaagaaaatccatataaaaatgtcttatactcttgtcattttattccaccaataagaaataatgatttatcatgaaaaagtgaaatattgtcaagtttttctttgtcttatagaagttatctgcattattagcataggctcatcattctttgattctgttgtccagttagtttctccttcttgcatactgtttcttcttcttatatgacattttataagttttgtataatttacacaggctcttagtaggcgttgatccttggcttagggctatatattgtcatggaacagaatgataaaattctacttctatagtcccttggagtgtaacttagtaaagatattaatttacaacgtgctctagtgatgagtcatagttgaccctattttatgtgtcagacgaacagcatcataatcatgacaacacttacttattgtcaggagacagctctgtctcaggttagctgtgtgacctcaggtaagtcagatgaagatctctgggccaagtttcctttttatcatttctaacatggggtgtggtatctccaaaatctatacaaatgctaataatctgctcttccagtatacttcctgaaaacgttgtgtgaagtccatgttggtgaaatagtcttttcttataattttttattacagtctgagatgtaagctcagggtaaaaaacaggtttgcataatatataataaatataataagcaatatacgttacattagcttatgggagtttaatatttttatcagtgtataacctacaatgcactgagttgtgaactgagttgagaacaaggtattaaagcaattgattggtgtcaaatttgcccaagtaagaatggaaagaggtcagacgctggttaagttggcatgtctctagtgaaagaagatgtgattatctaactgaaaatgtttaaaactgtttacatttttattgtacactataacaataataatagtaatagtattagagaactttaatttgcttggttgaatattgacttgaatttaatcttacaaatttagatataaatctgatgtactgtggtaggcaaaataataactgctcccaacccctgaaagatgctcacatcataatccctggaacctgtgaaaatgttaggttacaaagcaagggagaattaaggtcgtaaatggaattaaggttgcaaatcaactgacctttaattagggagattattctggattatcctgatgggcttaatgtaatcccaggggcctttaaaagtggcaggggaggcagagatttgagaatgctagctactagcttggaaggtaaaggaagcagacatgatccttaaatgcaggcagcttctagaagctggaaaaggcaaagaaatgggattctctcttagaacctccagagaaggaattcagccctgccaactttgattttatcccagggagacatttttgtaacagcaatagaaaattaatgcatgtactataaaaaaatcaagaagttcacgcaaattaattgaaattaattaatttattgaattgacttagagtcttttatcatctgatttttttaaaaatgcaaactggatctagtttttgggttttactaaataaaaaaaattaaatat

SEQ ID NO: 324 - DNA, 4067 bp, Homo sapiens
atactgtgtacctagatgccaggacacatttttaaagtccagataccatcaatgttgatgaagtaaataggtttgctgtatacttattagattattaagtattccagatttctaaagctcagtttttcaaaatgtaaagctatgtaccaagaccaaatgaaagaggaatttacaaaataattgagactgtctttacagttctaactatcagttatctttaatattgatgaaatgctatactttcacctagcaatcactctcatagtggaaatcaagcacatattcttttggaagtgaaatattgtgaaatttatacacatttttgtaaaagtcaaatacatggccttgtattatctaacactgagaatccaaggaggtagaagttattcaaatcaaaacaattattaaaatgagtggggaagtgtaaacaaagtcccaattaatacatttaataattgttatcctttgctgcttggaatctttggctttattatatttcttggacttcagccatggttataaaagaagcctgtttagttaggcacaaaataaaaactgacctattagcctggtgccaacactgaaatgaggttggctctaatgagaaatgtaacatacctacttcctcattttcatccctgtttatactttggtgggcatagattgagaacagagtgcttgccttttataaagagaggaggaattgttgagtagaagaattgctcagctagtgttcagaaattgagatcacatctgagctcgaccgtttatttactggctgtcactctttgggcaagttattttatctctacacatttagttcctcatctatcaaatggaactttaacgtgtatcttgctggcttccttaccgaaaacatatatttgaaaatgcttggcaaagtttagaatgctgaatagttgtaagatattaatgtgacatgaaattgagaaaaaaagtattggtgacaactggctacgtgaggatctgatgatatttgcaaagtatgaaaattccaagtattatttgaatttttatatttgttcatttagcaaaattcttttatggcactaaattcacatgtactattcttcttaaataagtcttaaaataattggttaatgtaggaataatatattttttataagtaagaagtaactagaattgtaaaaaaaaaaaaaaaaaaagtacctcaatttaaaaaccccataaaatctcagtcatagtaaggtctagtgcaaaagtaggagactgggctctctgtatgtttcagatgaaagtaagaaattgggatttttctgcctagacgattgccttggttcttcacaactttttgcctatttttaaattccttctttttaaatgttatagaattgaatttacttaaatgccatctgtactcaatagctactcctgtgactacgatgcaaagtaaacaatgttattagtcatctggaaaattcggtcttgaaaaatctaatttttaatctggatataccaggtaaaattaattttggttttagctttatcaaaaatatatatggagtacagtttccagatggcactaaggtttaaactgtagtatttataagcaacaccatttgaaagtttaaaagtatttttatcaacaggttagattagttggcattagaccttgaacctgtattgtttcttgttttacttcaaatgaatccttaaagccattttttgtttggcccagtggatctcataattataggaatccagctcagaaaccagagcagttcattgaatttgctataaaatgttcagttgttttgcattaaggtgtaaggctttttggtttccaacgtttccaataatctccctttgtttcctcagcgtcagtccagctgccgtggcaaagatccatttcacataataaagtgccctattacatcaagtaagttgattttaattctcctttatgataccaagaaaatcatgttttattgataacttaagaggcttctctccccataacttttaaaaatagaattcagtcctattatctgaaagaaactgtgatatagttaatattaaaaagaaactacttttaacatgagaattatatttttcatgtatcagattagggatataggtgtgtttagctgatatattttaaagtagagatttaaatatttggagacagacaataagctatgatggccatactgtattccagcctggacaacaaagcaagatccagtctctaaaaagtaaaaaaaaaaaaaattggagaaaaatgacagaatttcaaaatactcttgacataatgatatttgtcaaattgtacaaattctaaaccatttttcttcctctaagaaaatccatataaaaatgtcttatactcttgtcattttattccaccaataagaaataatgatttatcatgaaaaagtgaaatattgtcaagtttttctttgtcttatagaagttatctgcattattagcataggctcatcattctttgattctgttgtccagttagtttctccttcttgcatactgtttcttcttcttatatgacattttataagttttgtataatttacacaggctcttagtaggcgttgatccttggcttagggctatatattgtcatggaacagaatgataaaattctacttctatagtcccttggagtgtaacttagtaaagatattaatttacaacgtgctctagtgatgagtcatagttgaccctattttatgtgtcagacgaacagcatcataatcatgacaacacttacttattgtcaggagacagctctgtctcaggttagctgtgtgacctcaggtaagtcagatgaagatctctgggccaagtttcctttttatcatttctaacatggggtgtggtatctccaaaatctatacaaatgctaataatctgctcttccagtatacttcctgaaaacgttgtgtgaagtccatgttggtgaaatagtcttttcttataattttttattacagtctgagatgtaagctcagggtaaaaaacaggtttgcataatatataataaatataataagcaatatacgttacattagcttatgggagtttaatatttttatcagtgtataacctacaatgcactgagttgtgaactgagttgagaacaaggtattaaagcaattgattggtgtcaaatttgcccaagtaagaatggaaagaggtcagacgctggttaagttggcatgtctctagtgaaagaagatgtgattatctaactgaaaatgtttaaaactgtttacatttttattgtacactataacaataataatagtaatagtattagagaactttaatttgcttggttgaatattgacttgaatttaatcttacaaatttagatataaatctgatgtactgtggtaggcaaaataataactgctcccaacccctgaaagatgctcacatcataatccctggaacctgtgaaaatgttaggttacaaagcaagggagaattaaggtcgtaaatggaattaaggttgcaaatcaactgacctttaattagggagattattctggattatcctgatgggcttaatgtaatcccaggggcctttaaaagtggcaggggaggcagagatttgagaatgctagctactagcttggaaggtaaaggaagcagacatgatccttaaatgcaggcagcttctagaagctggaaaaggcaaagaaatgggattctctcttagaacctccagagaaggaattcagccctgccaactttgattttatcccagggagacatttttgtaacagcaatagaaaattaatgcatgtactataaaaaaatcaagaagttcacgcaaattaattgaaattaattaatttattgaattgacttagagtcttttatcatctgatttttttaaaaatgcaaactggatctagtttttgggttttactaaataaaaaaaattaaatatcttgctttatgtttatatcatgattatctgtgtggtttgggacttttaaagtccatccttaattttagctcttttttaaaaatgaatttctatatgtttaggttaatta

SEQ ID NO: 325 - DNA, 4036 bp, Homo sapiens
ctgtagtatttataagcaacaccatttgaaagtttaaaagtatttttatcaacaggttagattagttggcattagaccttgaacctgtattgtttcttgttttacttcaaatgaatccttaaagccattttttgtttggcccagtggatctcataattataggaatccagctcagaaaccagagcagttcattgaatttgctataaaatgttcagttgttttgcattaaggtgtaaggctttttggtttccaacgtttccaataatctccctttgtttcctcagcgtcagtccagctgccgtggcaaagatccatttcacataataaagtgccctattacatcaagtaagttgattttaattctcctttatgataccaagaaaatcatgttttattgataacttaagaggcttctctccccataacttttaaaaatagaattcagtcctattatctgaaagaaactgtgatatagttaatattaaaaagaaactacttttaacatgagaattatatttttcatgtatcagattagggatataggtgtgtttagctgatatattttaaagtagagatttaaatatttggagacagacaataagctatgatggccatactgtattccagcctggacaacaaagcaagatccagtctctaaaaagtaaaaaaaaaaaaaattggagaaaaatgacagaatttcaaaatactcttgacataatgatatttgtcaaattgtacaaattctaaaccatttttcttcctctaagaaaatccatataaaaatgtcttatactcttgtcattttattccaccaataagaaataatgatttatcatgaaaaagtgaaatattgtcaagtttttctttgtcttatagaagttatctgcattattagcataggctcatcattctttgattctgttgtccagttagtttctccttcttgcatactgtttcttcttcttatatgacattttataagttttgtataatttacacaggctcttagtaggcgttgatccttggcttagggctatatattgtcatggaacagaatgataaaattctacttctatagtcccttggagtgtaacttagtaaagatattaatttacaacgtgctctagtgatgagtcatagttgaccctattttatgtgtcagacgaacagcatcataatcatgacaacacttacttattgtcaggagacagctctgtctcaggttagctgtgtgacctcaggtaagtcagatgaagatctctgggccaagtttcctttttatcatttctaacatggggtgtggtatctccaaaatctatacaaatgctaataatctgctcttccagtatacttcctgaaaacgttgtgtgaagtccatgttggtgaaatagtcttttcttataattttttattacagtctgagatgtaagctcagggtaaaaaacaggtttgcataatatataataaatataataagcaatatacgttacattagcttatgggagtttaatatttttatcagtgtataacctacaatgcactgagttgtgaactgagttgagaacaaggtattaaagcaattgattggtgtcaaatttgcccaagtaagaatggaaagaggtcagacgctggttaagttggcatgtctctagtgaaagaagatgtgattatctaactgaaaatgtttaaaactgtttacatttttattgtacactataacaataataatagtaatagtattagagaactttaatttgcttggttgaatattgacttgaatttaatcttacaaatttagatataaatctgatgtactgtggtaggcaaaataataactgctcccaacccctgaaagatgctcacatcataatccctggaacctgtgaaaatgttaggttacaaagcaagggagaattaaggtcgtaaatggaattaaggttgcaaatcaactgacctttaattagggagattattctggattatcctgatgggcttaatgtaatcccaggggcctttaaaagtggcaggggaggcagagatttgagaatgctagctactagcttggaaggtaaaggaagcagacatgatccttaaatgcaggcagcttctagaagctggaaaaggcaaagaaatgggattctctcttagaacctccagagaaggaattcagccctgccaactttgattttatcccagggagacatttttgtaacagcaatagaaaattaatgcatgtactataaaaaaatcaagaagttcacgcaaattaattgaaattaattaatttattgaattgacttagagtcttttatcatctgatttttttaaaaatgcaaactggatctagtttttgggttttactaaataaaaaaaattaaatatcttgctttatgtttatatcatgattatctgtgtggtttgggacttttaaagtccatccttaattttagctcttttttaaaaatgaatttctatatgtttaggttaattatatatgactgagaattgtctaaatcagaatttctctaattcaaaatgtttataattttggaaggatctggtaggattgtattcttgttcttgtggggcagagttcttatggggcagattggtagaataaaagttagttttacctggcttcccattggctagagcactattaccagcactggaaaatagatataatataatgatggccactattttaaataataacgtttaggactgtagcatttaaaaaaatcttctccatcaccagtaaaagatcagattgtttaaaatatatgtagttttagtgttaaatgtcttttaagtcttccaaatttttagaaatgtgctcatttgtatatagcaaattcccattttcacaaaacttgtttaaccaggatctttcattgtgtaatttaacagtttatttcctcatgaagaaggaacatcaaattctgaaggtagagttataaaagccagtatttatgtgtgaagaattgttatgaaaacaaaatttaattcccaaattaataaccaagcaaatggagaatgaaaaagcttttaatatacacttccctttgcgtggcttcaaaagtagaagaaaaatgtttaaaacaaattttgcatgattgccatgcaatgagaatttcctggagcaaattagaatgtatatggctaacaaaaaataatattcaggtagaaatattcaacgtttttggtgtttaagtatatcatctttgtattcactgttagaatatggccagaaagttgaaaggagactaggaagggcaaattatttttatgtcatattttaattttatagatcacttaaagcccactttgatggcttcccactgcatttctgtctctctaggtaattccttattaatattttgaagtgcactgcggtggctccatggctcatgtgtttgtagaaaatgaaagaatataaatctgaactgaaagagtctatatagtataaacccctctatttgttgatatcttaagttaaaactagtctatatagtataaatccctctatttgttaatatcttaagttaaaactagtctatatagcataaacctctctatttgttaatatcttaagttaaaattaacatttgaaaattttatttgcttcctctaaggtagactttctgaaactgatctagttatttcttttttcctagtatagtgcaatgagagctcattgtattcagggtttaagaacatttaaaatggggccgggtgcagtggctcatgcttataatcctaatgcttgggaggctgaggcgggtggattgcttgcccccaggagttcaagaccagcctgagcaacatgacaaaaccccatctctacaaaaaattagctgggcatggtaacatgcgcctatagtcccagcagtcaggaggctgaggtgggaggatcacttgagcccgggaggtcaagactgcagtgagccatgatcacaccactgcactacagtctgggcaacagagtgaaactctgtctccttaaaaaataataataataataataaataaagag

SEQ ID NO: 326 - DNA, 4042 bp, Homo sapiens
agttggcattagaccttgaacctgtattgtttcttgttttacttcaaatgaatccttaaagccattttttgtttggcccagtggatctcataattataggaatccagctcagaaaccagagcagttcattgaatttgctataaaatgttcagttgttttgcattaaggtgtaaggctttttggtttccaacgtttccaataatctccctttgtttcctcagcgtcagtccagctgccgtggcaaagatccatttcacataataaagtgccctattacatcaagtaagttgattttaattctcctttatgataccaagaaaatcatgttttattgataacttaagaggcttctctccccataacttttaaaaatagaattcagtcctattatctgaaagaaactgtgatatagttaatattaaaaagaaactacttttaacatgagaattatatttttcatgtatcagattagggatataggtgtgtttagctgatatattttaaagtagagatttaaatatttggagacagacaataagctatgatggccatactgtattccagcctggacaacaaagcaagatccagtctctaaaaagtaaaaaaaaaaaaaattggagaaaaatgacagaatttcaaaatactcttgacataatgatatttgtcaaattgtacaaattctaaaccatttttcttcctctaagaaaatccatataaaaatgtcttatactcttgtcattttattccaccaataagaaataatgatttatcatgaaaaagtgaaatattgtcaagtttttctttgtcttatagaagttatctgcattattagcataggctcatcattctttgattctgttgtccagttagtttctccttcttgcatactgtttcttcttcttatatgacattttataagttttgtataatttacacaggctcttagtaggcgttgatccttggcttagggctatatattgtcatggaacagaatgataaaattctacttctatagtcccttggagtgtaacttagtaaagatattaatttacaacgtgctctagtgatgagtcatagttgaccctattttatgtgtcagacgaacagcatcataatcatgacaacacttacttattgtcaggagacagctctgtctcaggttagctgtgtgacctcaggtaagtcagatgaagatctctgggccaagtttcctttttatcatttctaacatggggtgtggtatctccaaaatctatacaaatgctaataatctgctcttccagtatacttcctgaaaacgttgtgtgaagtccatgttggtgaaatagtcttttcttataattttttattacagtctgagatgtaagctcagggtaaaaaacaggtttgcataatatataataaatataataagcaatatacgttacattagcttatgggagtttaatatttttatcagtgtataacctacaatgcactgagttgtgaactgagttgagaacaaggtattaaagcaattgattggtgtcaaatttgcccaagtaagaatggaaagaggtcagacgctggttaagttggcatgtctctagtgaaagaagatgtgattatctaactgaaaatgtttaaaactgtttacatttttattgtacactataacaataataatagtaatagtattagagaactttaatttgcttggttgaatattgacttgaatttaatcttacaaatttagatataaatctgatgtactgtggtaggcaaaataataactgctcccaacccctgaaagatgctcacatcataatccctggaacctgtgaaaatgttaggttacaaagcaagggagaattaaggtcgtaaatggaattaaggttgcaaatcaactgacctttaattagggagattattctggattatcctgatgggcttaatgtaatcccaggggcctttaaaagtggcaggggaggcagagatttgagaatgctagctactagcttggaaggtaaaggaagcagacatgatccttaaatgcaggcagcttctagaagctggaaaaggcaaagaaatgggattctctcttagaacctccagagaaggaattcagccctgccaactttgattttatcccagggagacatttttgtaacagcaatagaaaattaatgcatgtactataaaaaaatcaagaagttcacgcaaattaattgaaattaattaatttattgaattgacttagagtcttttatcatctgatttttttaaaaatgcaaactggatctagtttttgggttttactaaataaaaaaaattaaatatcttgctttatgtttatatcatgattatctgtgtggtttgggacttttaaagtccatccttaattttagctcttttttaaaaatgaatttctatatgtttaggttaattatatatgactgagaattgtctaaatcagaatttctctaattcaaaatgtttataattttggaaggatctggtaggattgtattcttgttcttgtggggcagagttcttatggggcagattggtagaataaaagttagttttacctggcttcccattggctagagcactattaccagcactggaaaatagatataatataatgatggccactattttaaataataacgtttaggactgtagcatttaaaaaaatcttctccatcaccagtaaaagatcagattgtttaaaatatatgtagttttagtgttaaatgtcttttaagtcttccaaatttttagaaatgtgctcatttgtatatagcaaattcccattttcacaaaacttgtttaaccaggatctttcattgtgtaatttaacagtttatttcctcatgaagaaggaacatcaaattctgaaggtagagttataaaagccagtatttatgtgtgaagaattgttatgaaaacaaaatttaattcccaaattaataaccaagcaaatggagaatgaaaaagcttttaatatacacttccctttgcgtggcttcaaaagtagaagaaaaatgtttaaaacaaattttgcatgattgccatgcaatgagaatttcctggagcaaattagaatgtatatggctaacaaaaaataatattcaggtagaaatattcaacgtttttggtgtttaagtatatcatctttgtattcactgttagaatatggccagaaagttgaaaggagactaggaagggcaaattatttttatgtcatattttaattttatagatcacttaaagcccactttgatggcttcccactgcatttctgtctctctaggtaattccttattaatattttgaagtgcactgcggtggctccatggctcatgtgtttgtagaaaatgaaagaatataaatctgaactgaaagagtctatatagtataaacccctctatttgttgatatcttaagttaaaactagtctatatagtataaatccctctatttgttaatatcttaagttaaaactagtctatatagcataaacctctctatttgttaatatcttaagttaaaattaacatttgaaaattttatttgcttcctctaaggtagactttctgaaactgatctagttatttcttttttcctagtatagtgcaatgagagctcattgtattcagggtttaagaacatttaaaatggggccgggtgcagtggctcatgcttataatcctaatgcttgggaggctgaggcgggtggattgcttgcccccaggagttcaagaccagcctgagcaacatgacaaaaccccatctctacaaaaaattagctgggcatggtaacatgcgcctatagtcccagcagtcaggaggctgaggtgggaggatcacttgagcccgggaggtcaagactgcagtgagccatgatcacaccactgcactacagtctgggcaacagagtgaaactctgtctccttaaaaaataataataataataataaataaagagagagagaaaaagaaaatttaaaatggttcttgctgccttcacaatatacaaaaatctgccataaaagcc

SEQ ID NO: 327 - DNA, 4046 bp, Homo sapiens
tattaatttacaacgtgctctagtgatgagtcatagttgaccctattttatgtgtcagacgaacagcatcataatcatgacaacacttacttattgtcaggagacagctctgtctcaggttagctgtgtgacctcaggtaagtcagatgaagatctctgggccaagtttcctttttatcatttctaacatggggtgtggtatctccaaaatctatacaaatgctaataatctgctcttccagtatacttcctgaaaacgttgtgtgaagtccatgttggtgaaatagtcttttcttataattttttattacagtctgagatgtaagctcagggtaaaaaacaggtttgcataatatataataaatataataagcaatatacgttacattagcttatgggagtttaatatttttatcagtgtataacctacaatgcactgagttgtgaactgagttgagaacaaggtattaaagcaattgattggtgtcaaatttgcccaagtaagaatggaaagaggtcagacgctggttaagttggcatgtctctagtgaaagaagatgtgattatctaactgaaaatgtttaaaactgtttacatttttattgtacactataacaataataatagtaatagtattagagaactttaatttgcttggttgaatattgacttgaatttaatcttacaaatttagatataaatctgatgtactgtggtaggcaaaataataactgctcccaacccctgaaagatgctcacatcataatccctggaacctgtgaaaatgttaggttacaaagcaagggagaattaaggtcgtaaatggaattaaggttgcaaatcaactgacctttaattagggagattattctggattatcctgatgggcttaatgtaatcccaggggcctttaaaagtggcaggggaggcagagatttgagaatgctagctactagcttggaaggtaaaggaagcagacatgatccttaaatgcaggcagcttctagaagctggaaaaggcaaagaaatgggattctctcttagaacctccagagaaggaattcagccctgccaactttgattttatcccagggagacatttttgtaacagcaatagaaaattaatgcatgtactataaaaaaatcaagaagttcacgcaaattaattgaaattaattaatttattgaattgacttagagtcttttatcatctgatttttttaaaaatgcaaactggatctagtttttgggttttactaaataaaaaaaattaaatatcttgctttatgtttatatcatgattatctgtgtggtttgggacttttaaagtccatccttaattttagctcttttttaaaaatgaatttctatatgtttaggttaattatatatgactgagaattgtctaaatcagaatttctctaattcaaaatgtttataattttggaaggatctggtaggattgtattcttgttcttgtggggcagagttcttatggggcagattggtagaataaaagttagttttacctggcttcccattggctagagcactattaccagcactggaaaatagatataatataatgatggccactattttaaataataacgtttaggactgtagcatttaaaaaaatcttctccatcaccagtaaaagatcagattgtttaaaatatatgtagttttagtgttaaatgtcttttaagtcttccaaatttttagaaatgtgctcatttgtatatagcaaattcccattttcacaaaacttgtttaaccaggatctttcattgtgtaatttaacagtttatttcctcatgaagaaggaacatcaaattctgaaggtagagttataaaagccagtatttatgtgtgaagaattgttatgaaaacaaaatttaattcccaaattaataaccaagcaaatggagaatgaaaaagcttttaatatacacttccctttgcgtggcttcaaaagtagaagaaaaatgtttaaaacaaattttgcatgattgccatgcaatgagaatttcctggagcaaattagaatgtatatggctaacaaaaaataatattcaggtagaaatattcaacgtttttggtgtttaagtatatcatctttgtattcactgttagaatatggccagaaagttgaaaggagactaggaagggcaaattatttttatgtcatattttaattttatagatcacttaaagcccactttgatggcttcccactgcatttctgtctctctaggtaattccttattaatattttgaagtgcactgcggtggctccatggctcatgtgtttgtagaaaatgaaagaatataaatctgaactgaaagagtctatatagtataaacccctctatttgttgatatcttaagttaaaactagtctatatagtataaatccctctatttgttaatatcttaagttaaaactagtctatatagcataaacctctctatttgttaatatcttaagttaaaattaacatttgaaaattttatttgcttcctctaaggtagactttctgaaactgatctagttatttcttttttcctagtatagtgcaatgagagctcattgtattcagggtttaagaacatttaaaatggggccgggtgcagtggctcatgcttataatcctaatgcttgggaggctgaggcgggtggattgcttgcccccaggagttcaagaccagcctgagcaacatgacaaaaccccatctctacaaaaaattagctgggcatggtaacatgcgcctatagtcccagcagtcaggaggctgaggtgggaggatcacttgagcccgggaggtcaagactgcagtgagccatgatcacaccactgcactacagtctgggcaacagagtgaaactctgtctccttaaaaaataataataataataataaataaagagagagagaaaaagaaaatttaaaatggttcttgctgccttcacaatatacaaaaatctgccataaaagccagatatctctcattgtaaatttttggttatgtattttgcacaagttgttcatttcctcagataaaagtcaacttccagggaatatgaggaataagaggaatgaaagctttgggttcggttgaactttcttaatgcatcacattaaccatgtaaaattcaccatttctcagtttgccacagaaataataataacatataataatgataaatagttgctgtgggaagtaataatgatcattgtaataaattacatttttgaacagtcatttatttgccaggtgttgtgctgaatcttgtgcatagatgatctcttttaattctctcattagccaagtgaagtataggtactataattacccccatttacacataagtcttaatgaattatcaataactgcattaaaagtaattaataagcacgcttacagcttgcttgagattacacagctggtaaatagaagagctagtgttcaaacccagggattgtctacagctcctgaactcctgatcactatgcggtgctgtgtcctggccccaatattagttgagtcagaggacggaagtttttagtcccatggaaactttgaataggatgaaggattatatttaggaaggaggatagtagtggagaaagtatgagcaaacatcctttctttcataccatagacggttaccatttactatgcacctcctgtgtgccagcaactgagtccagctgtccaaggacaaagcccatgctttttccagtactccacactgccgttgtataggcttttccataggctaatttctacaggaggatctattttctagatgtttaaagcagtttcacactgtggtctggtaatggacaaaggtgctttttcatagataggaagatgtcattcccacagtgcttgccagttggaccttgagaggaactctgaggtggggaaacacactctttggccttcctctatctttccccattcacatgatctgaagatttctgtcaactggtagatttaagtatctgcgagtaagatggccaacaaagctggcttat

SEQ ID NO: 328 - DNA, 4093 bp, Homo sapiens
aggaaaaaagatatctatactttataaagattaaatttttaaaactgccattgcaattagcaaaagtacagaagtaataatgtttaaaattgtaaaataaatagaaatatgctgattataaagtaaaataatacagtaaaagatttcatataaccatatagaaaaaaatagaagtaattaatcccttcttttaaaaatacataaaagaaagagataaagtagtaattttttttaataaaaagctaaaagctacaaatccagcttttaaaagcaaacttaaaggatacaatgatcccctcaactgttgtgggaacatagtcctggtgttaacaccttcagatgggggcatacaaggctccccagggccaatgcaacaacaaatgacctacaggaatttggctgatggtctgaatctccccagtttgagagtcacggagatgagggtagggttgggtgggaggtggggttccctatgaattctgggctcatgtagaaatattatcaagctagcagatcccctgggtttactgagtatttgcatgtttatatttccaagcaatttagtaccctcaagacaattatcacctgtccctcccctcgcacgtagacacatcagttttgatcattaattctactactttatttaaaaacaaacacaaataaactttgtcttattgttttgtaacaaatgttctagtagtcatacatgcaatattgacatcttatattttggggtgtatggtatggtagcctatttctatatagtcctttccatgtttgtatctttaaatctactcttgagtgtgaaattactttaagtgtattttgtttcagagacagggtctcactctgttgcccaggccagagtgcagtggtgcaaccatggctcattgcagtcttatactcctggcctcaagtgaacctcctgcctcagcctcctgagtagctgggactacaggtacatgccaccatgcccagctaattggactttttttagagatggagtcttgctatgttgcccaggctggtctcaaactcctgacctgaagcagtcctcctgctttggcctccccaaatgctgggattacagacatgagccactgtgcccagcttaaatgcattttatagtcaaatcctacggaattattcattatttacaatgttgtcttcctgcctcctgtcttcattatcatgagatactaatggcattttttaaggaagactctaaacttttgcagtacctattatcaaataggatcatatatcttatttgaattttggacagaattttttttttcttgaaattctgacctccacgcttcttttctcttaagttaatttttgtttctaaaagtatatctttggatttcctgcctttaaaagcttagaggacagtagacagtgtttgcgagtggatgaggaagttgaatataacctgaggaatatataagttattcctgcagctttctcacccactacctccatcctctccccaggggcttttccacacagacacacacacacccacacccacacccacacacacacaagcacgtgcacagagtgagaatcaatgttactgatgggggtactccacattcttcctatattctagtcttgggtgaaacaaggactgaaaagattataaattccaaagtaagtacaccacctctcagatctttaagaaggtgttactcaaataaatgttgtcatatcagattgccaacatttgttttcactcttcatactttaggcagttgaatgcaaaatcgattagttgggagctcgtgcttgattgctatatatatgtaacttctataagtgtacataaagtaaatgttaacagaacctgtattttgcctgtgtcaacttccttttctggagacttctggttttctcatagtacctcccaccttctaatacactgtataacttacttacagtgtttgtcgtctcttatttttccccatcctgaggcatggccactccacttggcaccatggagttcattgctaataattataggaccagtttgagtgcaggagaaaagttggaagccaaacagaagtggctggagtggtgaatgggacacgaggaagtagatatggtacagtactcattggtgaattttgcctgtgaaggagagaaaaaaggtgataactagcagaaaatgtagatttgaggtaggggtgtgtgtgtgtgtgtgtttaaggatggcacgtctgtaaacatttatattctacaaaggatagtcttcttgagagaggggttgacagtgcagcacaggaaatttttaagaaatcattgggaagaattggcctttaataagaagggggacaatttctcagttaaaggggagataggataacagactggcagttggagggaagtttcctgagttggtggtggagagagaaaggagtcctcatctagtagtatttaggttttcaatgaagcgtgagataaagtaaaatgatattaaggcagagaaataaaccagtttggggagagagatagcagtagtgaatttctgttttggagtttgggaaagcaagtttattagggaatatagtgcagttgccaggagttggacatttgaggtttgaaatcacatattttaaagtaaattgagtctgtctgttgagtgattttctccagttgtttttatccacagctgctcaggtccagagtaggcaagtaattgagctgatccaggcctgggatttgcaaggggtgagagagaagcaagggagatgaggttatttgtaatgattctaatgatagaccatggactcaaatttggacagattcatcaagaaatattttaaaaccttaattatgcaaatatacttccatatcaagagcttagcttaaaatgagactatctctgtttaaatcccatttctattacttactataggacctcagacaagctatctaagcactctctgccctagttttttccatctgtaagatggagacaatattgtcacccaagtcatagaattgtaatccaaatagaatttacacatagaaaaagtttatccaaaaaagtttacttggtacaaatcgagcactcaaatagcatgttattactgtgattaatatacatcctgacctagtatattttactttgcacagcaaagaagaaatatttttttctttgattgtcttatctcagagcaatatacatagttcttgtccccacatttgtatttttacttatctttagttttgttctgttatatgcctttataattataattggaatggaatgatatataacaaacctcacaaaatccagttataagcataaaattggatagctagtaacaaataagtatatttgggtaagtgttagtttttggagaaacaagttgccttctgatcatcctttaaggtttcatggaaaaatatgagaccactctaatgaggacaaatgggtttaagaagtatcttccacagagcagtcatttgcccagaaatcaagattttaccagcctatcaaaagtgcatgtcctttgctgttggttcattgtgttacatgttaggcagtattgcagcacaactttttttgttttatttgttggtgctacagtcttatattatttgtgttttactttctgtggcttatcagtgttatattgttatgaataataatagataggtggaaggatatactacttcttaaccttattggcttaatattttaataatgtccataaaatgcagagattatatgttatcccagctggggctcttcagagtaagggggcacttttaataattataccaggatgctgatatgtaattcctgtatacagtctagtataaagcaggatttatactgcttgaaggatagttttcaaaataggcaaaaatcttaactcttatacaaatacaaaaagagcatgtttcatttaactcatagtaagggaaccagtaagaagttataataggttccaaagagaatacaaaatgtcacatatttatagtgagattagggatgctaaaatgaatttacctctggatgcaaagctgacaaactggtcaatatccacaggacaataatcaattgcattccactgggcac

SEQ ID NO: 329 - DNA, 4084 bp, Homo sapiens
aaaataaatagaaatatgctgattataaagtaaaataatacagtaaaagatttcatataaccatatagaaaaaaatagaagtaattaatcccttcttttaaaaatacataaaagaaagagataaagtagtaattttttttaataaaaagctaaaagctacaaatccagcttttaaaagcaaacttaaaggatacaatgatcccctcaactgttgtgggaacatagtcctggtgttaacaccttcagatgggggcatacaaggctccccagggccaatgcaacaacaaatgacctacaggaatttggctgatggtctgaatctccccagtttgagagtcacggagatgagggtagggttgggtgggaggtggggttccctatgaattctgggctcatgtagaaatattatcaagctagcagatcccctgggtttactgagtatttgcatgtttatatttccaagcaatttagtaccctcaagacaattatcacctgtccctcccctcgcacgtagacacatcagttttgatcattaattctactactttatttaaaaacaaacacaaataaactttgtcttattgttttgtaacaaatgttctagtagtcatacatgcaatattgacatcttatattttggggtgtatggtatggtagcctatttctatatagtcctttccatgtttgtatctttaaatctactcttgagtgtgaaattactttaagtgtattttgtttcagagacagggtctcactctgttgcccaggccagagtgcagtggtgcaaccatggctcattgcagtcttatactcctggcctcaagtgaacctcctgcctcagcctcctgagtagctgggactacaggtacatgccaccatgcccagctaattggactttttttagagatggagtcttgctatgttgcccaggctggtctcaaactcctgacctgaagcagtcctcctgctttggcctccccaaatgctgggattacagacatgagccactgtgcccagcttaaatgcattttatagtcaaatcctacggaattattcattatttacaatgttgtcttcctgcctcctgtcttcattatcatgagatactaatggcattttttaaggaagactctaaacttttgcagtacctattatcaaataggatcatatatcttatttgaattttggacagaattttttttttcttgaaattctgacctccacgcttcttttctcttaagttaatttttgtttctaaaagtatatctttggatttcctgcctttaaaagcttagaggacagtagacagtgtttgcgagtggatgaggaagttgaatataacctgaggaatatataagttattcctgcagctttctcacccactacctccatcctctccccaggggcttttccacacagacacacacacacccacacccacacccacacacacacaagcacgtgcacagagtgagaatcaatgttactgatgggggtactccacattcttcctatattctagtcttgggtgaaacaaggactgaaaagattataaattccaaagtaagtacaccacctctcagatctttaagaaggtgttactcaaataaatgttgtcatatcagattgccaacatttgttttcactcttcatactttaggcagttgaatgcaaaatcgattagttgggagctcgtgcttgattgctatatatatgtaacttctataagtgtacataaagtaaatgttaacagaacctgtattttgcctgtgtcaacttccttttctggagacttctggttttctcatagtacctcccaccttctaatacactgtataacttacttacagtgtttgtcgtctcttatttttccccatcctgaggcatggccactccacttggcaccatggagttcattgctaataattataggaccagtttgagtgcaggagaaaagttggaagccaaacagaagtggctggagtggtgaatgggacacgaggaagtagatatggtacagtactcattggtgaattttgcctgtgaaggagagaaaaaaggtgataactagcagaaaatgtagatttgaggtaggggtgtgtgtgtgtgtgtgtttaaggatggcacgtctgtaaacatttatattctacaaaggatagtcttcttgagagaggggttgacagtgcagcacaggaaatttttaagaaatcattgggaagaattggcctttaataagaagggggacaatttctcagttaaaggggagataggataacagactggcagttggagggaagtttcctgagttggtggtggagagagaaaggagtcctcatctagtagtatttaggttttcaatgaagcgtgagataaagtaaaatgatattaaggcagagaaataaaccagtttggggagagagatagcagtagtgaatttctgttttggagtttgggaaagcaagtttattagggaatatagtgcagttgccaggagttggacatttgaggtttgaaatcacatattttaaagtaaattgagtctgtctgttgagtgattttctccagttgtttttatccacagctgctcaggtccagagtaggcaagtaattgagctgatccaggcctgggatttgcaaggggtgagagagaagcaagggagatgaggttatttgtaatgattctaatgatagaccatggactcaaatttggacagattcatcaagaaatattttaaaaccttaattatgcaaatatacttccatatcaagagcttagcttaaaatgagactatctctgtttaaatcccatttctattacttactataggacctcagacaagctatctaagcactctctgccctagttttttccatctgtaagatggagacaatattgtcacccaagtcatagaattgtaatccaaatagaatttacacatagaaaaagtttatccaaaaaagtttacttggtacaaatcgagcactcaaatagcatgttattactgtgattaatatacatcctgacctagtatattttactttgcacagcaaagaagaaatatttttttctttgattgtcttatctcagagcaatatacatagttcttgtccccacatttgtatttttacttatctttagttttgttctgttatatgcctttataattataattggaatggaatgatatataacaaacctcacaaaatccagttataagcataaaattggatagctagtaacaaataagtatatttgggtaagtgttagtttttggagaaacaagttgccttctgatcatcctttaaggtttcatggaaaaatatgagaccactctaatgaggacaaatgggtttaagaagtatcttccacagagcagtcatttgcccagaaatcaagattttaccagcctatcaaaagtgcatgtcctttgctgttggttcattgtgttacatgttaggcagtattgcagcacaactttttttgttttatttgttggtgctacagtcttatattatttgtgttttactttctgtggcttatcagtgttatattgttatgaataataatagataggtggaaggatatactacttcttaaccttattggcttaatattttaataatgtccataaaatgcagagattatatgttatcccagctggggctcttcagagtaagggggcacttttaataattataccaggatgctgatatgtaattcctgtatacagtctagtataaagcaggatttatactgcttgaaggatagttttcaaaataggcaaaaatcttaactcttatacaaatacaaaaagagcatgtttcatttaactcatagtaagggaaccagtaagaagttataataggttccaaagagaatacaaaatgtcacatatttatagtgagattagggatgctaaaatgaatttacctctggatgcaaagctgacaaactggtcaatatccacaggacaataatcaattgcattccactgggcacaatttgcatttatatggacagaaatcatttgcattactatctgttttcttcagtttgcagagtttaaaatagctcagagataat

SEQ ID NO: 330 - DNA, 4078 bp, Homo sapiens
acatagtcctggtgttaacaccttcagatgggggcatacaaggctccccagggccaatgcaacaacaaatgacctacaggaatttggctgatggtctgaatctccccagtttgagagtcacggagatgagggtagggttgggtgggaggtggggttccctatgaattctgggctcatgtagaaatattatcaagctagcagatcccctgggtttactgagtatttgcatgtttatatttccaagcaatttagtaccctcaagacaattatcacctgtccctcccctcgcacgtagacacatcagttttgatcattaattctactactttatttaaaaacaaacacaaataaactttgtcttattgttttgtaacaaatgttctagtagtcatacatgcaatattgacatcttatattttggggtgtatggtatggtagcctatttctatatagtcctttccatgtttgtatctttaaatctactcttgagtgtgaaattactttaagtgtattttgtttcagagacagggtctcactctgttgcccaggccagagtgcagtggtgcaaccatggctcattgcagtcttatactcctggcctcaagtgaacctcctgcctcagcctcctgagtagctgggactacaggtacatgccaccatgcccagctaattggactttttttagagatggagtcttgctatgttgcccaggctggtctcaaactcctgacctgaagcagtcctcctgctttggcctccccaaatgctgggattacagacatgagccactgtgcccagcttaaatgcattttatagtcaaatcctacggaattattcattatttacaatgttgtcttcctgcctcctgtcttcattatcatgagatactaatggcattttttaaggaagactctaaacttttgcagtacctattatcaaataggatcatatatcttatttgaattttggacagaattttttttttcttgaaattctgacctccacgcttcttttctcttaagttaatttttgtttctaaaagtatatctttggatttcctgcctttaaaagcttagaggacagtagacagtgtttgcgagtggatgaggaagttgaatataacctgaggaatatataagttattcctgcagctttctcacccactacctccatcctctccccaggggcttttccacacagacacacacacacccacacccacacccacacacacacaagcacgtgcacagagtgagaatcaatgttactgatgggggtactccacattcttcctatattctagtcttgggtgaaacaaggactgaaaagattataaattccaaagtaagtacaccacctctcagatctttaagaaggtgttactcaaataaatgttgtcatatcagattgccaacatttgttttcactcttcatactttaggcagttgaatgcaaaatcgattagttgggagctcgtgcttgattgctatatatatgtaacttctataagtgtacataaagtaaatgttaacagaacctgtattttgcctgtgtcaacttccttttctggagacttctggttttctcatagtacctcccaccttctaatacactgtataacttacttacagtgtttgtcgtctcttatttttccccatcctgaggcatggccactccacttggcaccatggagttcattgctaataattataggaccagtttgagtgcaggagaaaagttggaagccaaacagaagtggctggagtggtgaatgggacacgaggaagtagatatggtacagtactcattggtgaattttgcctgtgaaggagagaaaaaaggtgataactagcagaaaatgtagatttgaggtaggggtgtgtgtgtgtgtgtgtttaaggatggcacgtctgtaaacatttatattctacaaaggatagtcttcttgagagaggggttgacagtgcagcacaggaaatttttaagaaatcattgggaagaattggcctttaataagaagggggacaatttctcagttaaaggggagataggataacagactggcagttggagggaagtttcctgagttggtggtggagagagaaaggagtcctcatctagtagtatttaggttttcaatgaagcgtgagataaagtaaaatgatattaaggcagagaaataaaccagtttggggagagagatagcagtagtgaatttctgttttggagtttgggaaagcaagtttattagggaatatagtgcagttgccaggagttggacatttgaggtttgaaatcacatattttaaagtaaattgagtctgtctgttgagtgattttctccagttgtttttatccacagctgctcaggtccagagtaggcaagtaattgagctgatccaggcctgggatttgcaaggggtgagagagaagcaagggagatgaggttatttgtaatgattctaatgatagaccatggactcaaatttggacagattcatcaagaaatattttaaaaccttaattatgcaaatatacttccatatcaagagcttagcttaaaatgagactatctctgtttaaatcccatttctattacttactataggacctcagacaagctatctaagcactctctgccctagttttttccatctgtaagatggagacaatattgtcacccaagtcatagaattgtaatccaaatagaatttacacatagaaaaagtttatccaaaaaagtttacttggtacaaatcgagcactcaaatagcatgttattactgtgattaatatacatcctgacctagtatattttactttgcacagcaaagaagaaatatttttttctttgattgtcttatctcagagcaatatacatagttcttgtccccacatttgtatttttacttatctttagttttgttctgttatatgcctttataattataattggaatggaatgatatataacaaacctcacaaaatccagttataagcataaaattggatagctagtaacaaataagtatatttgggtaagtgttagtttttggagaaacaagttgccttctgatcatcctttaaggtttcatggaaaaatatgagaccactctaatgaggacaaatgggtttaagaagtatcttccacagagcagtcatttgcccagaaatcaagattttaccagcctatcaaaagtgcatgtcctttgctgttggttcattgtgttacatgttaggcagtattgcagcacaactttttttgttttatttgttggtgctacagtcttatattatttgtgttttactttctgtggcttatcagtgttatattgttatgaataataatagataggtggaaggatatactacttcttaaccttattggcttaatattttaataatgtccataaaatgcagagattatatgttatcccagctggggctcttcagagtaagggggcacttttaataattataccaggatgctgatatgtaattcctgtatacagtctagtataaagcaggatttatactgcttgaaggatagttttcaaaataggcaaaaatcttaactcttatacaaatacaaaaagagcatgtttcatttaactcatagtaagggaaccagtaagaagttataataggttccaaagagaatacaaaatgtcacatatttatagtgagattagggatgctaaaatgaatttacctctggatgcaaagctgacaaactggtcaatatccacaggacaataatcaattgcattccactgggcacaatttgcatttatatggacagaaatcatttgcattactatctgttttcttcagtttgcagagtttaaaatagctcagagataatttaagctttgcaggatacccactcattttttgcccacaacaaagaccttcacaatttttccctgcacaggcaaaactggatggctggccagcctagttacatgtcacatgttctcactattgtttgcttcatatgattttgtacttaactgttaattgctactttgttttttgttttgttttgtttttttttttttaattttattcttggata

SEQ ID NO: 331 - DNA, 4035 bp, Homo sapiens
attctgggctcatgtagaaatattatcaagctagcagatcccctgggtttactgagtatttgcatgtttatatttccaagcaatttagtaccctcaagacaattatcacctgtccctcccctcgcacgtagacacatcagttttgatcattaattctactactttatttaaaaacaaacacaaataaactttgtcttattgttttgtaacaaatgttctagtagtcatacatgcaatattgacatcttatattttggggtgtatggtatggtagcctatttctatatagtcctttccatgtttgtatctttaaatctactcttgagtgtgaaattactttaagtgtattttgtttcagagacagggtctcactctgttgcccaggccagagtgcagtggtgcaaccatggctcattgcagtcttatactcctggcctcaagtgaacctcctgcctcagcctcctgagtagctgggactacaggtacatgccaccatgcccagctaattggactttttttagagatggagtcttgctatgttgcccaggctggtctcaaactcctgacctgaagcagtcctcctgctttggcctccccaaatgctgggattacagacatgagccactgtgcccagcttaaatgcattttatagtcaaatcctacggaattattcattatttacaatgttgtcttcctgcctcctgtcttcattatcatgagatactaatggcattttttaaggaagactctaaacttttgcagtacctattatcaaataggatcatatatcttatttgaattttggacagaattttttttttcttgaaattctgacctccacgcttcttttctcttaagttaatttttgtttctaaaagtatatctttggatttcctgcctttaaaagcttagaggacagtagacagtgtttgcgagtggatgaggaagttgaatataacctgaggaatatataagttattcctgcagctttctcacccactacctccatcctctccccaggggcttttccacacagacacacacacacccacacccacacccacacacacacaagcacgtgcacagagtgagaatcaatgttactgatgggggtactccacattcttcctatattctagtcttgggtgaaacaaggactgaaaagattataaattccaaagtaagtacaccacctctcagatctttaagaaggtgttactcaaataaatgttgtcatatcagattgccaacatttgttttcactcttcatactttaggcagttgaatgcaaaatcgattagttgggagctcgtgcttgattgctatatatatgtaacttctataagtgtacataaagtaaatgttaacagaacctgtattttgcctgtgtcaacttccttttctggagacttctggttttctcatagtacctcccaccttctaatacactgtataacttacttacagtgtttgtcgtctcttatttttccccatcctgaggcatggccactccacttggcaccatggagttcattgctaataattataggaccagtttgagtgcaggagaaaagttggaagccaaacagaagtggctggagtggtgaatgggacacgaggaagtagatatggtacagtactcattggtgaattttgcctgtgaaggagagaaaaaaggtgataactagcagaaaatgtagatttgaggtaggggtgtgtgtgtgtgtgtgtttaaggatggcacgtctgtaaacatttatattctacaaaggatagtcttcttgagagaggggttgacagtgcagcacaggaaatttttaagaaatcattgggaagaattggcctttaataagaagggggacaatttctcagttaaaggggagataggataacagactggcagttggagggaagtttcctgagttggtggtggagagagaaaggagtcctcatctagtagtatttaggttttcaatgaagcgtgagataaagtaaaatgatattaaggcagagaaataaaccagtttggggagagagatagcagtagtgaatttctgttttggagtttgggaaagcaagtttattagggaatatagtgcagttgccaggagttggacatttgaggtttgaaatcacatattttaaagtaaattgagtctgtctgttgagtgattttctccagttgtttttatccacagctgctcaggtccagagtaggcaagtaattgagctgatccaggcctgggatttgcaaggggtgagagagaagcaagggagatgaggttatttgtaatgattctaatgatagaccatggactcaaatttggacagattcatcaagaaatattttaaaaccttaattatgcaaatatacttccatatcaagagcttagcttaaaatgagactatctctgtttaaatcccatttctattacttactataggacctcagacaagctatctaagcactctctgccctagttttttccatctgtaagatggagacaatattgtcacccaagtcatagaattgtaatccaaatagaatttacacatagaaaaagtttatccaaaaaagtttacttggtacaaatcgagcactcaaatagcatgttattactgtgattaatatacatcctgacctagtatattttactttgcacagcaaagaagaaatatttttttctttgattgtcttatctcagagcaatatacatagttcttgtccccacatttgtatttttacttatctttagttttgttctgttatatgcctttataattataattggaatggaatgatatataacaaacctcacaaaatccagttataagcataaaattggatagctagtaacaaataagtatatttgggtaagtgttagtttttggagaaacaagttgccttctgatcatcctttaaggtttcatggaaaaatatgagaccactctaatgaggacaaatgggtttaagaagtatcttccacagagcagtcatttgcccagaaatcaagattttaccagcctatcaaaagtgcatgtcctttgctgttggttcattgtgttacatgttaggcagtattgcagcacaactttttttgttttatttgttggtgctacagtcttatattatttgtgttttactttctgtggcttatcagtgttatattgttatgaataataatagataggtggaaggatatactacttcttaaccttattggcttaatattttaataatgtccataaaatgcagagattatatgttatcccagctggggctcttcagagtaagggggcacttttaataattataccaggatgctgatatgtaattcctgtatacagtctagtataaagcaggatttatactgcttgaaggatagttttcaaaataggcaaaaatcttaactcttatacaaatacaaaaagagcatgtttcatttaactcatagtaagggaaccagtaagaagttataataggttccaaagagaatacaaaatgtcacatatttatagtgagattagggatgctaaaatgaatttacctctggatgcaaagctgacaaactggtcaatatccacaggacaataatcaattgcattccactgggcacaatttgcatttatatggacagaaatcatttgcattactatctgttttcttcagtttgcagagtttaaaatagctcagagataatttaagctttgcaggatacccactcattttttgcccacaacaaagaccttcacaatttttccctgcacaggcaaaactggatggctggccagcctagttacatgtcacatgttctcactattgtttgcttcatatgattttgtacttaactgttaattgctactttgttttttgttttgttttgtttttttttttttaattttattcttggatagattcccatggctgttgccttttaaagagaggatttttagtaataaaatcataattttattttagagcttatcaagctgcacaatatgaagtcccactccctgttcatatttgagattaat

SEQ ID NO: 332 - DNA, 4045 bp, Homo sapiens
agctgggactacaggtacatgccaccatgcccagctaattggactttttttagagatggagtcttgctatgttgcccaggctggtctcaaactcctgacctgaagcagtcctcctgctttggcctccccaaatgctgggattacagacatgagccactgtgcccagcttaaatgcattttatagtcaaatcctacggaattattcattatttacaatgttgtcttcctgcctcctgtcttcattatcatgagatactaatggcattttttaaggaagactctaaacttttgcagtacctattatcaaataggatcatatatcttatttgaattttggacagaattttttttttcttgaaattctgacctccacgcttcttttctcttaagttaatttttgtttctaaaagtatatctttggatttcctgcctttaaaagcttagaggacagtagacagtgtttgcgagtggatgaggaagttgaatataacctgaggaatatataagttattcctgcagctttctcacccactacctccatcctctccccaggggcttttccacacagacacacacacacccacacccacacccacacacacacaagcacgtgcacagagtgagaatcaatgttactgatgggggtactccacattcttcctatattctagtcttgggtgaaacaaggactgaaaagattataaattccaaagtaagtacaccacctctcagatctttaagaaggtgttactcaaataaatgttgtcatatcagattgccaacatttgttttcactcttcatactttaggcagttgaatgcaaaatcgattagttgggagctcgtgcttgattgctatatatatgtaacttctataagtgtacataaagtaaatgttaacagaacctgtattttgcctgtgtcaacttccttttctggagacttctggttttctcatagtacctcccaccttctaatacactgtataacttacttacagtgtttgtcgtctcttatttttccccatcctgaggcatggccactccacttggcaccatggagttcattgctaataattataggaccagtttgagtgcaggagaaaagttggaagccaaacagaagtggctggagtggtgaatgggacacgaggaagtagatatggtacagtactcattggtgaattttgcctgtgaaggagagaaaaaaggtgataactagcagaaaatgtagatttgaggtaggggtgtgtgtgtgtgtgtgtttaaggatggcacgtctgtaaacatttatattctacaaaggatagtcttcttgagagaggggttgacagtgcagcacaggaaatttttaagaaatcattgggaagaattggcctttaataagaagggggacaatttctcagttaaaggggagataggataacagactggcagttggagggaagtttcctgagttggtggtggagagagaaaggagtcctcatctagtagtatttaggttttcaatgaagcgtgagataaagtaaaatgatattaaggcagagaaataaaccagtttggggagagagatagcagtagtgaatttctgttttggagtttgggaaagcaagtttattagggaatatagtgcagttgccaggagttggacatttgaggtttgaaatcacatattttaaagtaaattgagtctgtctgttgagtgattttctccagttgtttttatccacagctgctcaggtccagagtaggcaagtaattgagctgatccaggcctgggatttgcaaggggtgagagagaagcaagggagatgaggttatttgtaatgattctaatgatagaccatggactcaaatttggacagattcatcaagaaatattttaaaaccttaattatgcaaatatacttccatatcaagagcttagcttaaaatgagactatctctgtttaaatcccatttctattacttactataggacctcagacaagctatctaagcactctctgccctagttttttccatctgtaagatggagacaatattgtcacccaagtcatagaattgtaatccaaatagaatttacacatagaaaaagtttatccaaaaaagtttacttggtacaaatcgagcactcaaatagcatgttattactgtgattaatatacatcctgacctagtatattttactttgcacagcaaagaagaaatatttttttctttgattgtcttatctcagagcaatatacatagttcttgtccccacatttgtatttttacttatctttagttttgttctgttatatgcctttataattataattggaatggaatgatatataacaaacctcacaaaatccagttataagcataaaattggatagctagtaacaaataagtatatttgggtaagtgttagtttttggagaaacaagttgccttctgatcatcctttaaggtttcatggaaaaatatgagaccactctaatgaggacaaatgggtttaagaagtatcttccacagagcagtcatttgcccagaaatcaagattttaccagcctatcaaaagtgcatgtcctttgctgttggttcattgtgttacatgttaggcagtattgcagcacaactttttttgttttatttgttggtgctacagtcttatattatttgtgttttactttctgtggcttatcagtgttatattgttatgaataataatagataggtggaaggatatactacttcttaaccttattggcttaatattttaataatgtccataaaatgcagagattatatgttatcccagctggggctcttcagagtaagggggcacttttaataattataccaggatgctgatatgtaattcctgtatacagtctagtataaagcaggatttatactgcttgaaggatagttttcaaaataggcaaaaatcttaactcttatacaaatacaaaaagagcatgtttcatttaactcatagtaagggaaccagtaagaagttataataggttccaaagagaatacaaaatgtcacatatttatagtgagattagggatgctaaaatgaatttacctctggatgcaaagctgacaaactggtcaatatccacaggacaataatcaattgcattccactgggcacaatttgcatttatatggacagaaatcatttgcattactatctgttttcttcagtttgcagagtttaaaatagctcagagataatttaagctttgcaggatacccactcattttttgcccacaacaaagaccttcacaatttttccctgcacaggcaaaactggatggctggccagcctagttacatgtcacatgttctcactattgtttgcttcatatgattttgtacttaactgttaattgctactttgttttttgttttgttttgtttttttttttttaattttattcttggatagattcccatggctgttgccttttaaagagaggatttttagtaataaaatcataattttattttagagcttatcaagctgcacaatatgaagtcccactccctgttcatatttgagattaattagaacccaagctgttgttattttgggggaaaatgctacttttattctgttttggttgcctactctgggagaacttcaggcattttggcaagaggagctgagctatctgcagctgttcaaatactttaagcctttgggttcattgtggattttgctttaaccctctcccccgacttaaaaaaaaaacagcagccaactgcattgcctgttttttttatttctgttgtttggtaagcagcagttatacttttgtaaccagaggctgtatttattttctgtgttggcagttctgcctaatgaatcaactggtattgaattcacaaagggagatgcccgttccctccctccatctgtttgccaaatgtgtgtgttccgtcagctctcagtagtggtttcactaaaaagagccattagcaagaggtgttcaccttgaattcttagtcctccgcctgactgagaaatagtggtattttcctct

SEQ ID NO: 333 - DNA, 4046 bp, Homo sapiens
aaagcaagtttattagggaatatagtgcagttgccaggagttggacatttgaggtttgaaatcacatattttaaagtaaattgagtctgtctgttgagtgattttctccagttgtttttatccacagctgctcaggtccagagtaggcaagtaattgagctgatccaggcctgggatttgcaaggggtgagagagaagcaagggagatgaggttatttgtaatgattctaatgatagaccatggactcaaatttggacagattcatcaagaaatattttaaaaccttaattatgcaaatatacttccatatcaagagcttagcttaaaatgagactatctctgtttaaatcccatttctattacttactataggacctcagacaagctatctaagcactctctgccctagttttttccatctgtaagatggagacaatattgtcacccaagtcatagaattgtaatccaaatagaatttacacatagaaaaagtttatccaaaaaagtttacttggtacaaatcgagcactcaaatagcatgttattactgtgattaatatacatcctgacctagtatattttactttgcacagcaaagaagaaatatttttttctttgattgtcttatctcagagcaatatacatagttcttgtccccacatttgtatttttacttatctttagttttgttctgttatatgcctttataattataattggaatggaatgatatataacaaacctcacaaaatccagttataagcataaaattggatagctagtaacaaataagtatatttgggtaagtgttagtttttggagaaacaagttgccttctgatcatcctttaaggtttcatggaaaaatatgagaccactctaatgaggacaaatgggtttaagaagtatcttccacagagcagtcatttgcccagaaatcaagattttaccagcctatcaaaagtgcatgtcctttgctgttggttcattgtgttacatgttaggcagtattgcagcacaactttttttgttttatttgttggtgctacagtcttatattatttgtgttttactttctgtggcttatcagtgttatattgttatgaataataatagataggtggaaggatatactacttcttaaccttattggcttaatattttaataatgtccataaaatgcagagattatatgttatcccagctggggctcttcagagtaagggggcacttttaataattataccaggatgctgatatgtaattcctgtatacagtctagtataaagcaggatttatactgcttgaaggatagttttcaaaataggcaaaaatcttaactcttatacaaatacaaaaagagcatgtttcatttaactcatagtaagggaaccagtaagaagttataataggttccaaagagaatacaaaatgtcacatatttatagtgagattagggatgctaaaatgaatttacctctggatgcaaagctgacaaactggtcaatatccacaggacaataatcaattgcattccactgggcacaatttgcatttatatggacagaaatcatttgcattactatctgttttcttcagtttgcagagtttaaaatagctcagagataatttaagctttgcaggatacccactcattttttgcccacaacaaagaccttcacaatttttccctgcacaggcaaaactggatggctggccagcctagttacatgtcacatgttctcactattgtttgcttcatatgattttgtacttaactgttaattgctactttgttttttgttttgttttgtttttttttttttaattttattcttggatagattcccatggctgttgccttttaaagagaggatttttagtaataaaatcataattttattttagagcttatcaagctgcacaatatgaagtcccactccctgttcatatttgagattaattagaacccaagctgttgttattttgggggaaaatgctacttttattctgttttggttgcctactctgggagaacttcaggcattttggcaagaggagctgagctatctgcagctgttcaaatactttaagcctttgggttcattgtggattttgctttaaccctctcccccgacttaaaaaaaaaacagcagccaactgcattgcctgttttttttatttctgttgtttggtaagcagcagttatacttttgtaaccagaggctgtatttattttctgtgttggcagttctgcctaatgaatcaactggtattgaattcacaaagggagatgcccgttccctccctccatctgtttgccaaatgtgtgtgttccgtcagctctcagtagtggtttcactaaaaagagccattagcaagaggtgttcaccttgaattcttagtcctccgcctgactgagaaatagtggtattttcctcttgtgattccgtaggggttgtgtgaggtgaagacccacacctgtaattccagagaaagcatatttgttgtttaagtataacgtctggctctacattaccgatggctttagtttggttcttgagccttggtttgctccatcatgatgggatgtctgtctctggacagtactgttgtcgtggggattgaaattccctgaaagagaagacaagagatcaatgaaccctagtaggttctctcagactgggagcccatgatgccttactggaattgcattacctcctcagcaaatccttccatatttgttggtaatagggaggaaattctttttgagactctgcatttctgtaaagctctgagcctaatgatgaatagtaagaatttaggtcaaacaacttcagtacccggctccatggtcttttgagcaatttgtagtatcactaccatcaaaccgaaagggtggaatggttttgttggtgttcagtagtggaccatgaagtagaagtatttgtctctgcattggagtcaagaatctgggtagaggagcccgacaactttccatctctttccaagacagatcttcacattgtagttacattattttgtttgagatcttggaatttccaggatacatacccaattgctaatatttccgggatacgtacccaactgcaaatacacactttaaatatttttcaaaggtaagtatgagttatttggggtttttgttacctgtgtatatataacagtgatgatattcttttcccagtgacatgccccagtttttgatatattacataggcttgaaaaataatttctcttgaatttgattttatgaatgttgtaatatcactctcttaggtactatgctggttcatttagtttactaaatagttttataagaactaggtgtcatttaagaagtctttggagcactattaaatgttatgaatctaccctgacctagataaggggcagttaactctttttaaatgtaaggccactgacccaccaaagtcatgaactgtttacctaagaaacttaattgaagcattccatttatgttttaacctcaatttattaccccaaaacttccatctaacatatgaattagttttgaaatttacagaaaaagagaaagtataaaacttgcttttaaagtgaagaacatgaggaaaacaatttaatacatatagaaaataataatactggttaatgagaggaagctgagaagaggaacacagagtctaagtggcaagagacacttgcctgaggggagtggggaatccagatacacatgaagagaagaaagggtagatttgcactgaggaaagttcgactcaaggtagaagaggagggaggctctgtagattgtgggatgatgttattcagagttaaacttgtttctgcaatctttggaaatatgacgagacttttaaggtgtagtgactcccacagcactacttctgctgttggaggattcgttctgaatgataatctacatctgtttaacagatatgggtttattctggagcctgcattgatctggccacatcaagccaggaccgaagggttcatgacagtcacattttatatctaggttttaa

SEQ ID NO: 334 - DNA, 4050 bp, Homo sapiens
aatatttttttctttgattgtcttatctcagagcaatatacatagttcttgtccccacatttgtatttttacttatctttagttttgttctgttatatgcctttataattataattggaatggaatgatatataacaaacctcacaaaatccagttataagcataaaattggatagctagtaacaaataagtatatttgggtaagtgttagtttttggagaaacaagttgccttctgatcatcctttaaggtttcatggaaaaatatgagaccactctaatgaggacaaatgggtttaagaagtatcttccacagagcagtcatttgcccagaaatcaagattttaccagcctatcaaaagtgcatgtcctttgctgttggttcattgtgttacatgttaggcagtattgcagcacaactttttttgttttatttgttggtgctacagtcttatattatttgtgttttactttctgtggcttatcagtgttatattgttatgaataataatagataggtggaaggatatactacttcttaaccttattggcttaatattttaataatgtccataaaatgcagagattatatgttatcccagctggggctcttcagagtaagggggcacttttaataattataccaggatgctgatatgtaattcctgtatacagtctagtataaagcaggatttatactgcttgaaggatagttttcaaaataggcaaaaatcttaactcttatacaaatacaaaaagagcatgtttcatttaactcatagtaagggaaccagtaagaagttataataggttccaaagagaatacaaaatgtcacatatttatagtgagattagggatgctaaaatgaatttacctctggatgcaaagctgacaaactggtcaatatccacaggacaataatcaattgcattccactgggcacaatttgcatttatatggacagaaatcatttgcattactatctgttttcttcagtttgcagagtttaaaatagctcagagataatttaagctttgcaggatacccactcattttttgcccacaacaaagaccttcacaatttttccctgcacaggcaaaactggatggctggccagcctagttacatgtcacatgttctcactattgtttgcttcatatgattttgtacttaactgttaattgctactttgttttttgttttgttttgtttttttttttttaattttattcttggatagattcccatggctgttgccttttaaagagaggatttttagtaataaaatcataattttattttagagcttatcaagctgcacaatatgaagtcccactccctgttcatatttgagattaattagaacccaagctgttgttattttgggggaaaatgctacttttattctgttttggttgcctactctgggagaacttcaggcattttggcaagaggagctgagctatctgcagctgttcaaatactttaagcctttgggttcattgtggattttgctttaaccctctcccccgacttaaaaaaaaaacagcagccaactgcattgcctgttttttttatttctgttgtttggtaagcagcagttatacttttgtaaccagaggctgtatttattttctgtgttggcagttctgcctaatgaatcaactggtattgaattcacaaagggagatgcccgttccctccctccatctgtttgccaaatgtgtgtgttccgtcagctctcagtagtggtttcactaaaaagagccattagcaagaggtgttcaccttgaattcttagtcctccgcctgactgagaaatagtggtattttcctcttgtgattccgtaggggttgtgtgaggtgaagacccacacctgtaattccagagaaagcatatttgttgtttaagtataacgtctggctctacattaccgatggctttagtttggttcttgagccttggtttgctccatcatgatgggatgtctgtctctggacagtactgttgtcgtggggattgaaattccctgaaagagaagacaagagatcaatgaaccctagtaggttctctcagactgggagcccatgatgccttactggaattgcattacctcctcagcaaatccttccatatttgttggtaatagggaggaaattctttttgagactctgcatttctgtaaagctctgagcctaatgatgaatagtaagaatttaggtcaaacaacttcagtacccggctccatggtcttttgagcaatttgtagtatcactaccatcaaaccgaaagggtggaatggttttgttggtgttcagtagtggaccatgaagtagaagtatttgtctctgcattggagtcaagaatctgggtagaggagcccgacaactttccatctctttccaagacagatcttcacattgtagttacattattttgtttgagatcttggaatttccaggatacatacccaattgctaatatttccgggatacgtacccaactgcaaatacacactttaaatatttttcaaaggtaagtatgagttatttggggtttttgttacctgtgtatatataacagtgatgatattcttttcccagtgacatgccccagtttttgatatattacataggcttgaaaaataatttctcttgaatttgattttatgaatgttgtaatatcactctcttaggtactatgctggttcatttagtttactaaatagttttataagaactaggtgtcatttaagaagtctttggagcactattaaatgttatgaatctaccctgacctagataaggggcagttaactctttttaaatgtaaggccactgacccaccaaagtcatgaactgtttacctaagaaacttaattgaagcattccatttatgttttaacctcaatttattaccccaaaacttccatctaacatatgaattagttttgaaatttacagaaaaagagaaagtataaaacttgcttttaaagtgaagaacatgaggaaaacaatttaatacatatagaaaataataatactggttaatgagaggaagctgagaagaggaacacagagtctaagtggcaagagacacttgcctgaggggagtggggaatccagatacacatgaagagaagaaagggtagatttgcactgaggaaagttcgactcaaggtagaagaggagggaggctctgtagattgtgggatgatgttattcagagttaaacttgtttctgcaatctttggaaatatgacgagacttttaaggtgtagtgactcccacagcactacttctgctgttggaggattcgttctgaatgataatctacatctgtttaacagatatgggtttattctggagcctgcattgatctggccacatcaagccaggaccgaagggttcatgacagtcacattttatatctaggttttaatttgtagtttcagttctgtttgaaataggcaaagcaaagatttcatttgtgtttttacaatgtagttgctcaaatgaaatttattattaaaaaatttttataaaaaacttttgtatagagatgaggtctcgctatgttgccaagctggtctcaaactcctgggctcccacctcaggctcccaaagtgttgggattatagatgtgaggcaccacacctggctaaaatttattattaatattttttatttttttgagacagtgtctcactctgtcacccaggctacagtgcagtgaaacgatctcggctcactgcaacctccacctcccagcttcaagcaattctcatgcctcaccctcctgagtagctaggactacaggcacccaccaccatacctggctaatttttgtatttttagtagcgatgggatttcatcatattggccaggcttgtctcaatctcctgacctcaagtgatccacctgcctcggcctcccaaagtgctgggattacaggaagagccactgcccctggccaatgtttcaaatgttaagtaacaattgggcattgggtttctgaatggttgataatgaggataattttgcatgta

SEQ ID NO: 335 - DNA, 4049 bp, Homo sapiens
gaatttgattttatgaatgttgtaatatcactctcttaggtactatgctggttcatttagtttactaaatagttttataagaactaggtgtcatttaagaagtctttggagcactattaaatgttatgaatctaccctgacctagataaggggcagttaactctttttaaatgtaaggccactgacccaccaaagtcatgaactgtttacctaagaaacttaattgaagcattccatttatgttttaacctcaatttattaccccaaaacttccatctaacatatgaattagttttgaaatttacagaaaaagagaaagtataaaacttgcttttaaagtgaagaacatgaggaaaacaatttaatacatatagaaaataataatactggttaatgagaggaagctgagaagaggaacacagagtctaagtggcaagagacacttgcctgaggggagtggggaatccagatacacatgaagagaagaaagggtagatttgcactgaggaaagttcgactcaaggtagaagaggagggaggctctgtagattgtgggatgatgttattcagagttaaacttgtttctgcaatctttggaaatatgacgagacttttaaggtgtagtgactcccacagcactacttctgctgttggaggattcgttctgaatgataatctacatctgtttaacagatatgggtttattctggagcctgcattgatctggccacatcaagccaggaccgaagggttcatgacagtcacattttatatctaggttttaatttgtagtttcagttctgtttgaaataggcaaagcaaagatttcatttgtgtttttacaatgtagttgctcaaatgaaatttattattaaaaaatttttataaaaaacttttgtatagagatgaggtctcgctatgttgccaagctggtctcaaactcctgggctcccacctcaggctcccaaagtgttgggattatagatgtgaggcaccacacctggctaaaatttattattaatattttttatttttttgagacagtgtctcactctgtcacccaggctacagtgcagtgaaacgatctcggctcactgcaacctccacctcccagcttcaagcaattctcatgcctcaccctcctgagtagctaggactacaggcacccaccaccatacctggctaatttttgtatttttagtagcgatgggatttcatcatattggccaggcttgtctcaatctcctgacctcaagtgatccacctgcctcggcctcccaaagtgctgggattacaggaagagccactgcccctggccaatgtttcaaatgttaagtaacaattgggcattgggtttctgaatggttgataatgaggataattttgcatgtatttttaaaaatttgaaaaaaatcatttctacttgggtatttcgtttttggcctatatgaagttttttgattttttgtttatttttaaaattttaccttttttttccagccatcaaacacagaccacctgttgggaccatcctaaaatgaccgaactctttcaatcccttggtaagtgttattaatagtaataaattaacctaaacaactgagaaccggtttttttttttttttttttttttttttttttttttttaaggtggattctcgctgttgcccaggctggagtgcagtggcatgatctcggctcactgcaacctctgcctcccggattcaagcaattctcctgccttaggctcctgagtagctgggactacaggcgcccgccgccactcccagctaatttttcgtattttaatagagacagggttttactgtgttgcccaggctggtctcgaactcctgagctcaggcaatccacccgcctcggcctcccaaagtgctcccgtgagccactgtgcccggccgagaactgtatattgttaaataggagctaatcaccagcctttcttacatggcatattaatgttaaaagaatcatgtcattgacatttaaaagtagttaaatttctaagggcaatgcagtaaacaggtattgcctttcttaggagaattgtgtggtttgaaatcatgtgagccaaaaagagttgatttacagggaggaatgtaattgtagtttttacctccttcgtattgagtcatcttaaccttcagctttgcacgcaaaaaatatatatagatatacaattacaatatagccaactttaatccactgccttaaatttgcttttggctcactttttatttagtacgtgccatcaaattagctcacctagtttaaatttgtctaaattgttaaaagctaaattcatttttatataaaaatgcaagaaaacacagacgagaattccggttttgttttaatttctagtgcaatgtggctttcaacttattgtttaacctacttcctctggttggtccagcggtttttttaagttttctctttgggtagctaaggagatgctggagggaaaaacagcacccgaagcctccctctcccatttcaataaaaaggatgcccccttttttaatctctttaaatgttgggcttctgtgtgagtgtttttttttttggtgggtgaaggggcctgcaaaagttggacaaacaaaagacatagaactggtttgcttagtttgtaaaatgagggggcaaattttgatgatatctgagttttcttttaactctactaatctctgatactctgtctttaggggacaaagaaagaaattacaatatctattgtttccaaagagttgagtattggttgtaggatcatttgaaccagatctgcaaaagggcaggaaaaccaaatcaatcaggatgggaggagcatagaaataagatgagctccatgaatagtgaactggacagtgtggttggaagaaaatgaagtgtccttggggaagatgcccctggaggaaaatctcctttattgggaaaaaaaggaagggccctctgcctactgtgcagtgcatttaataagccatgtgacagctgtgctttctcttcatcaccttcctctttttcctaccaaagggctgaaaggggtggtaccttttctcacccatcataagggtcatggtgaccctcctataacaaaagacaggtcaaccagaaaagcacaagaaatttacttaatcaaagttttacctgacatgagaaccttcagaagactcaaagaaaacagggaaaagtgtctgtttttacacttagattgagtgaggaatggatgactgcattgaattgtgattggatgaaagggtataatttaatgataatagactgagaagggaattccagcaaggcctatctattcagattcttcttggcttctccctgcagcatattcctttcctctagggacaggatacctgtcacaggagaatcttcaggagagaagggagaaggtgacagtgaacttgctagattttatggcttgctttggggaagagaagttctagttttcatgacccaccttggggaaggggaattctggtttctatttatcactttggaaggagaaagagggtcaggagacaagagacccagaggtcagagagaccttactactgaggccttccagtctccttcatttcaaagtactcaacccaccatgttctgagccctgacacctgttgaaaatactttcttagaattttctctgtagcactgctttgagatgtatctcaacatggtgctaatgatcatttaacttttttcttaaatacgtgttggggaatttgggagaagactttttatttcaggcaaacataatattttttcatcatccaaagtaaccaaatacattctgggcattcaatatatattcaataataagcctatcttcaaattgtttctttttctatttcagctgacctgaataatgtacgtttttctgcctaccgtacagcaatcaaaatccgaagactacaaaaagcactatgttgtgagttattctaccaaagttaatcaatctgttacttgaattgcgttttttttttttccaagaggaagataaatgaagaggatggagtgtt

SEQ ID NO: 336 - DNA, 4044 bp, Homo sapiens
ttaaggtgtagtgactcccacagcactacttctgctgttggaggattcgttctgaatgataatctacatctgtttaacagatatgggtttattctggagcctgcattgatctggccacatcaagccaggaccgaagggttcatgacagtcacattttatatctaggttttaatttgtagtttcagttctgtttgaaataggcaaagcaaagatttcatttgtgtttttacaatgtagttgctcaaatgaaatttattattaaaaaatttttataaaaaacttttgtatagagatgaggtctcgctatgttgccaagctggtctcaaactcctgggctcccacctcaggctcccaaagtgttgggattatagatgtgaggcaccacacctggctaaaatttattattaatattttttatttttttgagacagtgtctcactctgtcacccaggctacagtgcagtgaaacgatctcggctcactgcaacctccacctcccagcttcaagcaattctcatgcctcaccctcctgagtagctaggactacaggcacccaccaccatacctggctaatttttgtatttttagtagcgatgggatttcatcatattggccaggcttgtctcaatctcctgacctcaagtgatccacctgcctcggcctcccaaagtgctgggattacaggaagagccactgcccctggccaatgtttcaaatgttaagtaacaattgggcattgggtttctgaatggttgataatgaggataattttgcatgtatttttaaaaatttgaaaaaaatcatttctacttgggtatttcgtttttggcctatatgaagttttttgattttttgtttatttttaaaattttaccttttttttccagccatcaaacacagaccacctgttgggaccatcctaaaatgaccgaactctttcaatcccttggtaagtgttattaatagtaataaattaacctaaacaactgagaaccggtttttttttttttttttttttttttttttttttttttaaggtggattctcgctgttgcccaggctggagtgcagtggcatgatctcggctcactgcaacctctgcctcccggattcaagcaattctcctgccttaggctcctgagtagctgggactacaggcgcccgccgccactcccagctaatttttcgtattttaatagagacagggttttactgtgttgcccaggctggtctcgaactcctgagctcaggcaatccacccgcctcggcctcccaaagtgctcccgtgagccactgtgcccggccgagaactgtatattgttaaataggagctaatcaccagcctttcttacatggcatattaatgttaaaagaatcatgtcattgacatttaaaagtagttaaatttctaagggcaatgcagtaaacaggtattgcctttcttaggagaattgtgtggtttgaaatcatgtgagccaaaaagagttgatttacagggaggaatgtaattgtagtttttacctccttcgtattgagtcatcttaaccttcagctttgcacgcaaaaaatatatatagatatacaattacaatatagccaactttaatccactgccttaaatttgcttttggctcactttttatttagtacgtgccatcaaattagctcacctagtttaaatttgtctaaattgttaaaagctaaattcatttttatataaaaatgcaagaaaacacagacgagaattccggttttgttttaatttctagtgcaatgtggctttcaacttattgtttaacctacttcctctggttggtccagcggtttttttaagttttctctttgggtagctaaggagatgctggagggaaaaacagcacccgaagcctccctctcccatttcaataaaaaggatgcccccttttttaatctctttaaatgttgggcttctgtgtgagtgtttttttttttggtgggtgaaggggcctgcaaaagttggacaaacaaaagacatagaactggtttgcttagtttgtaaaatgagggggcaaattttgatgatatctgagttttcttttaactctactaatctctgatactctgtctttaggggacaaagaaagaaattacaatatctattgtttccaaagagttgagtattggttgtaggatcatttgaaccagatctgcaaaagggcaggaaaaccaaatcaatcaggatgggaggagcatagaaataagatgagctccatgaatagtgaactggacagtgtggttggaagaaaatgaagtgtccttggggaagatgcccctggaggaaaatctcctttattgggaaaaaaaggaagggccctctgcctactgtgcagtgcatttaataagccatgtgacagctgtgctttctcttcatcaccttcctctttttcctaccaaagggctgaaaggggtggtaccttttctcacccatcataagggtcatggtgaccctcctataacaaaagacaggtcaaccagaaaagcacaagaaatttacttaatcaaagttttacctgacatgagaaccttcagaagactcaaagaaaacagggaaaagtgtctgtttttacacttagattgagtgaggaatggatgactgcattgaattgtgattggatgaaagggtataatttaatgataatagactgagaagggaattccagcaaggcctatctattcagattcttcttggcttctccctgcagcatattcctttcctctagggacaggatacctgtcacaggagaatcttcaggagagaagggagaaggtgacagtgaacttgctagattttatggcttgctttggggaagagaagttctagttttcatgacccaccttggggaaggggaattctggtttctatttatcactttggaaggagaaagagggtcaggagacaagagacccagaggtcagagagaccttactactgaggccttccagtctccttcatttcaaagtactcaacccaccatgttctgagccctgacacctgttgaaaatactttcttagaattttctctgtagcactgctttgagatgtatctcaacatggtgctaatgatcatttaacttttttcttaaatacgtgttggggaatttgggagaagactttttatttcaggcaaacataatattttttcatcatccaaagtaaccaaatacattctgggcattcaatatatattcaataataagcctatcttcaaattgtttctttttctatttcagctgacctgaataatgtacgtttttctgcctaccgtacagcaatcaaaatccgaagactacaaaaagcactatgttgtgagttattctaccaaagttaatcaatctgttacttgaattgcgttttttttttttccaagaggaagataaatgaagaggatggagtgtttgccaagttaatctggtcttcagtgtacctcactcaaggagttggttttgtttctataaatgttttattacttgccccatcagtgtgcagtactgaacacatgccattcttacttggagaacaaaattaaccaaaacacaggagtaatgtaaaaagctttttcaaaaattgtgctgccacccaatttaaaaggattaaatcaaagaaagtattaagtcatgtgttttcagtaccttttgcccatttggcaatgtagagttccagtttgtctcaataccactatatataaagaaacactaaaaaatcacattcctgatctaaatttgaactggcaccttaacaagtgagataaaaggctctattttcttttaaatatatcttgagacatttagtattatcaatgcatttttcctgtggaggatgtgttcagagtggaattctgtggcagtcctttcatcaaaaggatatttcctcccgcaaaataacctaaaattaagtagcagtgtgaatacttagcatatagatttatgctatctggattctatttgtggttgtagttctaatgattgagtctaccctaggccttgtcagatagttgatgtggaaag

SEQ ID NO: 337 - DNA, 4042 bp, Homo sapiens
aaccttcagaagactcaaagaaaacagggaaaagtgtctgtttttacacttagattgagtgaggaatggatgactgcattgaattgtgattggatgaaagggtataatttaatgataatagactgagaagggaattccagcaaggcctatctattcagattcttcttggcttctccctgcagcatattcctttcctctagggacaggatacctgtcacaggagaatcttcaggagagaagggagaaggtgacagtgaacttgctagattttatggcttgctttggggaagagaagttctagttttcatgacccaccttggggaaggggaattctggtttctatttatcactttggaaggagaaagagggtcaggagacaagagacccagaggtcagagagaccttactactgaggccttccagtctccttcatttcaaagtactcaacccaccatgttctgagccctgacacctgttgaaaatactttcttagaattttctctgtagcactgctttgagatgtatctcaacatggtgctaatgatcatttaacttttttcttaaatacgtgttggggaatttgggagaagactttttatttcaggcaaacataatattttttcatcatccaaagtaaccaaatacattctgggcattcaatatatattcaataataagcctatcttcaaattgtttctttttctatttcagctgacctgaataatgtacgtttttctgcctaccgtacagcaatcaaaatccgaagactacaaaaagcactatgttgtgagttattctaccaaagttaatcaatctgttacttgaattgcgttttttttttttccaagaggaagataaatgaagaggatggagtgtttgccaagttaatctggtcttcagtgtacctcactcaaggagttggttttgtttctataaatgttttattacttgccccatcagtgtgcagtactgaacacatgccattcttacttggagaacaaaattaaccaaaacacaggagtaatgtaaaaagctttttcaaaaattgtgctgccacccaatttaaaaggattaaatcaaagaaagtattaagtcatgtgttttcagtaccttttgcccatttggcaatgtagagttccagtttgtctcaataccactatatataaagaaacactaaaaaatcacattcctgatctaaatttgaactggcaccttaacaagtgagataaaaggctctattttcttttaaatatatcttgagacatttagtattatcaatgcatttttcctgtggaggatgtgttcagagtggaattctgtggcagtcctttcatcaaaaggatatttcctcccgcaaaataacctaaaattaagtagcagtgtgaatacttagcatatagatttatgctatctggattctatttgtggttgtagttctaatgattgagtctaccctaggccttgtcagatagttgatgtggaaagtgatatttacctgttcttttaagatagggtaaattgaaaagtttcaagtattcttctttgctaccttttgttaactgttaatatacgtctaggcagttcagtgatgctttgaaaattatgctttgaaaaatgatatgttaaggttgaaaaatctgctccttgaaagtcaatagaagttagcaataaattttaagctggctgcacgaagaattgaggaaagagaggtataatgtcattgagaaaaaatagcaatgcaaagcttgaaaataggaaaagcttaagctatgtatggaagagaagtctacagggctgaaagacacctccagatgaggcaatgcaaggaagaatgagatgaccttgacttttgcataatccacagagcctcaaagataattagcaggtggtagtagttgcagcaagtgttgcagaattacccggacaaagaaaagaaagccaccacgctctggctactgatcagtatgttgagcgaaaagagaataggaagtaaattacgaacacacaaaagggatgtttggtctgcgcaggagtccatggtgacagcagttttgaaagaggctcagctgcacatccaggatccagttgatgggtctggaagttcttctcaggcctgatgagctataaaatgaggacaaatgactcagccacaaaatttccattgacagaagactgctttttgtcattatgaacatggtcccagttttcgacaacacttatgggtggataagcatattaacacatttggtgttttcttctcttggttctttggattcctgaagaaaaaaaccccctcctcagctcttcccctcaaacctgagaggaacagaagggacgcttctccaacttctaaactaaacgagattggtaatgacaattaaacaactaaatgacagttagaaaagggctagattgtattggatttcaagtatatgaggtgcttttttcagagccaactgaccttcacttttcctacagccttctcccactgccctccagccaaggcctctgggccactcctggagctcatcagtttattattaatctgcttcttcctctcccttcctttcagtttactagaaataccctgaccctttctctgcactggcttgtaacccttttttcctcccaaatactgttaaagatttacctcttttggaaacatttacaagctaatcctacccgtctccacattttttcccagtagtttatgattgcctgtaatagcaggttctctcaccttagtgacaagtgcttgcctttgtgtgctcgaataatgtttggtggattgccccatctccactgtgaactactttaggtcatggctgtctctcattatgtgcaaatctccacccagcataaggcagagggcagtgtcattgttcattcatttgttgggctccaagattgtgcaggagataaaacactataaagagacttgattctcacactgaaggaactcatatttcgagaacgttgcacatggacccaatgccctgcttacaaaagattcctgctgccctcagaatggaatggtctttgcctggctcacctctctgtccacctccttccctctgctccaccggggcatcaccatttcatcatccacttagtgatagaaatggcaaactctgtattccattcctcctgcctaaaaagcacttgtcttagctctttgtataggttgatgcaaaaataattgcagtttttgccgttaaaagtaagttagggtatttcattaaaagtaatggcaaaaacctcaattacttttgcaccaacttaatccttctgttcttcccttggctgggacactcattcctgtaggtctcaatgttgtcgatcacctctcttttaatgaggttttctatggctcctcatagaactgttcttttccttacatgacacttctggtgcttggtttaggcactaaggcagagtgtcaatggtaatttttaatattctgtttattagttattgtttgcttctccatcatgggatggatgagtctgtgttcgtctctacttaggacctcatacaatttctggcacagagcaggggttgcttaggacacactgagtgaatgatttgagtttgaaggttatatagcagtactccagaagatgtgtccaaggagatttatagcagtacttttcatagtaaaactcattcagttttggcatatttataaatataatacagcaacaaaaatcaatgagctagtaatcagcatcaacatgatttaatcttagaactataaaattaaatgaaaaaattaaatggcagaaaaaaaatgtgtaccactctgttccatttatatgtagttcaaacccatgcaaaactaatgctatatacacttttaaaaactgaaagtgaaatacaaaggttaatggttaccccataattgtaagaggatgtaattaggcaggattcaaggagcttccaagatagtggtaacattctgtttttttcagctgtgtgatggactaatgggtatttgttctattattttcttttagaccacacatatgtattttctgttttc

SEQ ID NO: 338 - DNA, 4047 bp, Homo sapiens
tgctttagggaatatctaagaaagaccaaagggcagagaacagagaatgggtaaatagttcaggtgaaggatgatcaaagctgagctggctgggagttgtaggaggggagatcagggtctggatttttaaggctgcctgaggaagaactgatgactcggggtattgggtagttggtaaattgtggcaggtagaagaaggaaggatgttaggatatttcacggtttgcagactggatttcatcatgacaagaaggccaggcctttatggggagaggttcctgaaagagaattatatagctcttgtagggatcagagcaatgggacatgggtcaagtgttgaggcaggagatcagcaggagaaaagagaatctggagccatccaaagagaagcaataatagaagtaagaggagtgagtgagggcctcaggctcacagaatgaaatgccagatgtgaaaccttgagctctgcctatatttctggggaagagaagataggggaaatgctaataataataataataataataataaaataaaaaaataaagaatggccacatagcttgacacctggagaagtgtcactgaagcccaagattggatgcttaacagtgttcattgttttgcagaacaggagaatgatgatgcatttctattccatcccctgtgccttgtatgtgggattaaagaaaaagtcagaaagttggatagaaaatgattatgctgtttgtttcatttaccacatgactgagctgtcatttgtctccctttgaaatgagaaaatcttaatcataattttctgtgatttaaatgtagtcagttctttaaaggtacctaaatgtgacacacttcaggaagatttacgcttgacttaggcactaagacaaagtgtcagagtaaatcactaaaaattgaagacatgatagtctgtgggatgtggcaaattagtgtcacagctacagagtgtataaccagggagacttcagaaagaaatgcaaggacagcctgatgcaggaaatgggctttttggaatttggtctgttgtcacctgatgccatgtggggatccaatagcagtgctgtgttactggcataattaatgttggaattcagaaaacttacagccttttggccatatttgaatatgttccttggtgtctgtggggagctgtagttccctagctactgccctttattaaacactttcctttgtcaggcactttgcttctgccctctagaggtttacaattgaaaactgtgtacagttgacccttgacacccaaaacttaacatgttaacagtcaattaacacatatttgatatgctatgtaatatatactcttattctacaacaaagtaagctagagaaaagaaaattttaagaaaatagtaaaagacaaaatatatttaatattcactaattggaagtgatcatcataaagggtcttcatccttgttgacttcatgttgattaatctgagggggaggaagaagaggagcagttggtgttgctgtctcaggggtaacagaggcagaaagggtagaggagaaaagagaggcaggcacgttcagtgcttaactttaattgaaaaaactccacgtgtaggtggaccctcacagttcaaactggcgctgttcaagcgtcaactgtacagggcaaagaaatgaggtaagaattacagtgaaaattccagatggttcttagtttttttctgacaccttctctaactcatatgaagcttatttgacttatttttgttattagcttaagtttaccaatgatacatttggcatctgaaggaaatggattggttcgttatccagacttgtatgttttatgtttatctctttaaaaaaaaaaaaagtcttccctgttgagttgtttttgaaatcattttactctgtatgggtttaaagcagttcttttaatttgtagataacttaaaaaataaataattctgtgttactcagacagctagcatggacacatttcatacatgtctttaaaaattcaaaattattagttattcagtggttacaaatggataaatacaaaggaagctatttgttcattttagttaactgtcaaaatatgtcatattttttgagagaacagtttttgcatcaggcgaagagaaagaagttggttttatatgtatataaccttattttttctctttgcctcttatttttcatgctaaaagttaaatatataacatatgtgtatatataaccaactattttctctttgcctcttatttttttaatgccaaaaagttaaaaaataagaaaaaataagattagagttcttctagtctaatttttttatgctaaaaggttaaatacagagacagagaaagaattttataaaaactgatgtctatgagcagaccttaaattaatgtggactctaattttccttactcagatgtttagatttagaagagtcatctccacactcaataaatgtatagatagatacatggtagtttgataatctgctttgtctctttgttttcagttagtgaatgaaagacttaaaattgattaaattaaaaaaaaatttgtcgttttcatctaaactcctccttcgggcctttgcgggcctccccttgggcagtgtgtgcctggaccatgcatttctcctgtctgtttcactgccggcaaacaccactcgtgtgtaagtcacgcatcacccacactgcagtccaccattccttagagcctctgggcttgagtgaattcttgccttttctcaagtacttctctaaacctggaattctttcctcacttcatgtggatctcttgtattttatccatttttcaaagcccatttcaaatcgcacctctccagggagccttttccagttgtctttcctctcctagaagtagtagctctagcagaaatttgcgtattcctctcatagggcatgtttactcctccttttagtaaagccatcagtatgtctttgagagcaggggctctgccttcacctcctgtgcacaccctcctggctctagccccagccatgcctaccatagatgttgtacacatgaagagtaaggatgggaacaaatttgtgaagaccaatggatgtgggggctgtctagtacttcttcttagctacaggtcacctctgtgtctagagtactgactgctctagtacttcttcttagctacaggtcacctctgtgtcagagcatcatcggaagtaaaccaggttagggccagtttgtgacaatcttatagatcgggcttgattcagcaggcagtggagagctgttatttttctataaaacctgttttttaatatggagcatcttcagtaaattttgtatgtaatgatgtacatgataaaagactgtttaagaacaattagtttggctgtgatacaaagaatgaagagagcagtgcacaggctgcttgcaggagttaagatgaggagagcagtgtaatatttgagatgcgctgccatttggagtagattgagagatttatgccttgctacatttaaaagcaaaaagagcctggcaaagggaaagccagaaaaagaaagtaggaataattaatattccaaagagcaaaaaatgagataagattgggaagcaacagagttcagattcaaaagtatgaaagtgtggtaaaatgtaagaatagaaatgtgtttgtttctttaaaagctgaaatttagctaaaaaggatagattcttaaattgaagaatcaagctaaatacttgagactagaaatgcctttgttgtgatgttgttatgtaatgtaatgtaatgtaatgactgtaaacattccttcttctctcctggttagtggatctcttagagttgagtacaacaaatgaaattttcaaacagcacaagttgaaccaaaatgaccagctcctcagtgttccagatgtcatcaactgtctgacaacaacttatgatggacttgagcaaatgcataaggacctggtcaacgttccactctgtgttgatatgtgtctcaattggttgctcaatgtctatgacacgtaagtttatattttttctcattaa

SEQ ID NO: 339 - DNA, 4044 bp, Homo sapiens
aagagaatctggagccatccaaagagaagcaataatagaagtaagaggagtgagtgagggcctcaggctcacagaatgaaatgccagatgtgaaaccttgagctctgcctatatttctggggaagagaagataggggaaatgctaataataataataataataataataaaataaaaaaataaagaatggccacatagcttgacacctggagaagtgtcactgaagcccaagattggatgcttaacagtgttcattgttttgcagaacaggagaatgatgatgcatttctattccatcccctgtgccttgtatgtgggattaaagaaaaagtcagaaagttggatagaaaatgattatgctgtttgtttcatttaccacatgactgagctgtcatttgtctccctttgaaatgagaaaatcttaatcataattttctgtgatttaaatgtagtcagttctttaaaggtacctaaatgtgacacacttcaggaagatttacgcttgacttaggcactaagacaaagtgtcagagtaaatcactaaaaattgaagacatgatagtctgtgggatgtggcaaattagtgtcacagctacagagtgtataaccagggagacttcagaaagaaatgcaaggacagcctgatgcaggaaatgggctttttggaatttggtctgttgtcacctgatgccatgtggggatccaatagcagtgctgtgttactggcataattaatgttggaattcagaaaacttacagccttttggccatatttgaatatgttccttggtgtctgtggggagctgtagttccctagctactgccctttattaaacactttcctttgtcaggcactttgcttctgccctctagaggtttacaattgaaaactgtgtacagttgacccttgacacccaaaacttaacatgttaacagtcaattaacacatatttgatatgctatgtaatatatactcttattctacaacaaagtaagctagagaaaagaaaattttaagaaaatagtaaaagacaaaatatatttaatattcactaattggaagtgatcatcataaagggtcttcatccttgttgacttcatgttgattaatctgagggggaggaagaagaggagcagttggtgttgctgtctcaggggtaacagaggcagaaagggtagaggagaaaagagaggcaggcacgttcagtgcttaactttaattgaaaaaactccacgtgtaggtggaccctcacagttcaaactggcgctgttcaagcgtcaactgtacagggcaaagaaatgaggtaagaattacagtgaaaattccagatggttcttagtttttttctgacaccttctctaactcatatgaagcttatttgacttatttttgttattagcttaagtttaccaatgatacatttggcatctgaaggaaatggattggttcgttatccagacttgtatgttttatgtttatctctttaaaaaaaaaaaaagtcttccctgttgagttgtttttgaaatcattttactctgtatgggtttaaagcagttcttttaatttgtagataacttaaaaaataaataattctgtgttactcagacagctagcatggacacatttcatacatgtctttaaaaattcaaaattattagttattcagtggttacaaatggataaatacaaaggaagctatttgttcattttagttaactgtcaaaatatgtcatattttttgagagaacagtttttgcatcaggcgaagagaaagaagttggttttatatgtatataaccttattttttctctttgcctcttatttttcatgctaaaagttaaatatataacatatgtgtatatataaccaactattttctctttgcctcttatttttttaatgccaaaaagttaaaaaataagaaaaaataagattagagttcttctagtctaatttttttatgctaaaaggttaaatacagagacagagaaagaattttataaaaactgatgtctatgagcagaccttaaattaatgtggactctaattttccttactcagatgtttagatttagaagagtcatctccacactcaataaatgtatagatagatacatggtagtttgataatctgctttgtctctttgttttcagttagtgaatgaaagacttaaaattgattaaattaaaaaaaaatttgtcgttttcatctaaactcctccttcgggcctttgcgggcctccccttgggcagtgtgtgcctggaccatgcatttctcctgtctgtttcactgccggcaaacaccactcgtgtgtaagtcacgcatcacccacactgcagtccaccattccttagagcctctgggcttgagtgaattcttgccttttctcaagtacttctctaaacctggaattctttcctcacttcatgtggatctcttgtattttatccatttttcaaagcccatttcaaatcgcacctctccagggagccttttccagttgtctttcctctcctagaagtagtagctctagcagaaatttgcgtattcctctcatagggcatgtttactcctccttttagtaaagccatcagtatgtctttgagagcaggggctctgccttcacctcctgtgcacaccctcctggctctagccccagccatgcctaccatagatgttgtacacatgaagagtaaggatgggaacaaatttgtgaagaccaatggatgtgggggctgtctagtacttcttcttagctacaggtcacctctgtgtctagagtactgactgctctagtacttcttcttagctacaggtcacctctgtgtcagagcatcatcggaagtaaaccaggttagggccagtttgtgacaatcttatagatcgggcttgattcagcaggcagtggagagctgttatttttctataaaacctgttttttaatatggagcatcttcagtaaattttgtatgtaatgatgtacatgataaaagactgtttaagaacaattagtttggctgtgatacaaagaatgaagagagcagtgcacaggctgcttgcaggagttaagatgaggagagcagtgtaatatttgagatgcgctgccatttggagtagattgagagatttatgccttgctacatttaaaagcaaaaagagcctggcaaagggaaagccagaaaaagaaagtaggaataattaatattccaaagagcaaaaaatgagataagattgggaagcaacagagttcagattcaaaagtatgaaagtgtggtaaaatgtaagaatagaaatgtgtttgtttctttaaaagctgaaatttagctaaaaaggatagattcttaaattgaagaatcaagctaaatacttgagactagaaatgcctttgttgtgatgttgttatgtaatgtaatgtaatgtaatgactgtaaacattccttcttctctcctggttagtggatctcttagagttgagtacaacaaatgaaattttcaaacagcacaagttgaaccaaaatgaccagctcctcagtgttccagatgtcatcaactgtctgacaacaacttatgatggacttgagcaaatgcataaggacctggtcaacgttccactctgtgttgatatgtgtctcaattggttgctcaatgtctatgacacgtaagtttatattttttctcattaaaatacgatcactgaatgaaatatgttaatagaaaatgtctgatttttaagtgaattttttaataagtgctttcaaattactttcccagtggaaatatttatgtttgttgttgaaactgaatgattttacaaatcattgagcttcttaacaaacaatagaacagaaaagaatgtacatctttcattttaaaatgttgcttcaatttacaaagactgtcaaatttatagtattctttgccaaaatgctaggggaaacaatatagctaagtcctactttcttcttgtttcataatgtctcacagtatttcttttttcaaaataaaaaatcttctgtttattgttatgaattacagtaattt

SEQ ID NO: 340 - DNA, 4049 bp, Homo sapiens
ctttgatttacagctattttttcctgaagttatcctcatgttctattaatagctattcttttacttccttccaaataatgcccaaatgtattcatcaagctgtctattttctttggtttagggaattgagttacttttttggatcataaattgacagaaaggctgtaatacttataaaatatacacatataaatctcacactcataggtatcttatctcaaataaataagtgccctgtgtatggagaggaaatctgtagaaaatattgctgaattataatggaggaagtgcccacatcacattatagctttaaccaggaaaaagaaatctccccaagaaaatttgtgagacatcatttattactattatcaacttattcactcaacaaattaatattgaacattttgcaggtgtcaggccctcttgtcaaagataagcaaaaccagacactagttaaagtggtaaggacagattttaatcaataatatactgattatgcacatgtatttctgtttgtacagaggtgactgggtgttttcagaagggaatagactggggaaacaaaagagggacttgagcagaggcaaggaagtgaaaaatgacaaagcattggtcagcatcagttccatcagaccagctgtgtctgtgagctggcaattgtcagagttaggattctaccattccagagagagactgggagacaggggtcctatccttcctgatgattacatttcaaagaaatggttttcagatccttgagaaagacactcctgagttgttggagatacatccacatctcaaagggacagaggaaggattccccattgtaaaccctttccagtaaatgccctaagaaagagtgagcagggacctgtcttcaggtgttggctagagtgaacagtaaattcttttggcagtctggagtttgtttttcaggcagacgctttaaggggtcagacgccttaataatcccttttttaagggtcatcctagggatgtggtcttgaactgttataaattatgttcatgtttgtttaagtcttttaatggagaagtgggtggacagggatggacaaaatgatttgtgctgaaaatttgcagcttttataggccaaggcttcagtagacaacagagcttacaggaggccaactcaaatttggtcaaggagagaatccttgtcagtaatttcagctctgatagtgtatcagagtatacccagaaagataagattgtggacttcctgctactctccctttaggaggaagaatgtgtgagaatgaacaaggaaacgaataaatggggttgttatacattgcagtaagtgcctttaaggaaatgaatggataatgagatagaatgattagaagagacattttagataaagaaatcagtaaggtttgtctgagttgacatttgagttgagaccaaagtttgagaaagattcagccctgtaaagaactagtagaagcatgtttcagaaagaagaaacagaacatatagtggtctgagttgggaaaaaggttagcgtgattgggctgcagaaagtgaagcctgttccccaaggggcgcatggaaaggagcactggttacacaactggaagtgcccagtgcaaaatgaaactggggggccccttgtttaacaattattaagacttccgagttggcaacatcagaggagtaaatgaagttcaaagcccttctgattgtagggccctgtacaactgcataagtgcaatagttcaaagcccttctgattgtagggccctgtacaactgcataagtgcaatatctttgaagctcaccctgaggctgggaaagaggtgggtgtaaccagggaacagaaagaaaccaggacaaatttgacaaaagagagacaatagtaggagatggaattaaaaagaaaggcaactatcagattgtatagaaccctggggatcattgtaaggaatttggattgggggaaaatatcatagtaatatttacatgaatagctattatagaagtttagaaaactgattataaaatgctagtatcaaaatatcataaagtaaatatatgttgttatagtaaagatatataaaattactatttttcttggtcttgaacatataataattcttaatggctttacaaaatacctaaacaatttgaaacccacatatcttcaacagttgtcatgcagtaggtgcatacttaagaatcactgatacacatatgaattccactctccaactaccaattttaaatgaaatctgtaagttacccaaaactgttcttgttgcatagtctttcaaaagtcactgtttatcatttccaagattgcagcttatcctgcattatacaaggatagcttcatttttcaagacatcctttgcccatttctgaggctttgtagtgatcttatcaacagcctacttataaatcatctgtatgacaggtcactttctgcatttgaccctacaactttttgtaaaataactagaaatatatgtaaattgaatctttaaaaagatacttgcatttaatagcaatgaatgatctgattgctattattgtagcattaatgtctttccattcattctctgaagccacagagaaagatgcatctctttacaactaaactaatcagacctattccaactggaccccattttactattggaattgttcttatattcattcccttcatgtgtaatctttgtgcaataattaagtcaccattagcttgaagaaacctttgcttgctcactcttgtgcctaaaccaggtatcaagtctggacatatttctctctcattcgaaatacaaattttagatgtactatattctcaatgtagaaaacaggaaaaatataaatgcaagtattcagaaatcattgctttctgaaatttctttctgttcacccacattctttacatttgctctactcttttaagttttatttatggttcatccatcttttactcaacatttcctaaagtcgtttcatgtctgccttagaaaatgaactcaagtgtgaatttgtttggtacagtgataataagcaacacttgagtgttaaatggatcagaccttcccatatggaccttgatgtttgcattcctcagactgcatctccctttttagttaagaagatgctccagtcaccttactgacttcatctctttccttttcaaagtcctttacagctgactctgaatgtttctatttttaagagctttctgcaatttagaaaccttattttaaatccacaaagcaccctaaatattttgccaatatatctgcttatgatttatggtaatgttttcctttagctgtaagaagactaatggtatatgaatgaactatcatgactcatgaaagtattttatgatattgataatttatatatgtatatataaattatctgaagaaatgtagcagaatttttatttctctaggaaatgattttttgtcttatttccccctactattctataatccaaatttgtacatttaagaattctttcattaggcttaataagagttgatcttcaagagacagcatgacacagatgatatttaatgcctgtcatcattctgtctccatatgtccaaatcccaccttctcacaaaaacagctcaactcccactttgtgtgtgaaatctctcccagctcctccagttttaccctcatcaaagcacttagttcaggggcctctgccaatagcctctactttaccaattaggatttgattctatgttcccttgtatcattttctaactgtggtgtttttgtcttctcaattatctttttacctccttgaggactgggatgacttttatacttttctccctgtgttagttaaatttgcctcataaaagccagatgagctcgtatctgactttataaatactagttatagaatattaaagctggaattaaagctctaagagatcatctaacttatctttattttgaagaaaaaactaagtcttagagaaggtaagtgatttgtgcaaagttaatggtatggatttagtgacttaactccattagggaaatacac

SEQ ID NO: 341 - DNA, 4040 bp, Homo sapiens
agaaatctccccaagaaaatttgtgagacatcatttattactattatcaacttattcactcaacaaattaatattgaacattttgcaggtgtcaggccctcttgtcaaagataagcaaaaccagacactagttaaagtggtaaggacagattttaatcaataatatactgattatgcacatgtatttctgtttgtacagaggtgactgggtgttttcagaagggaatagactggggaaacaaaagagggacttgagcagaggcaaggaagtgaaaaatgacaaagcattggtcagcatcagttccatcagaccagctgtgtctgtgagctggcaattgtcagagttaggattctaccattccagagagagactgggagacaggggtcctatccttcctgatgattacatttcaaagaaatggttttcagatccttgagaaagacactcctgagttgttggagatacatccacatctcaaagggacagaggaaggattccccattgtaaaccctttccagtaaatgccctaagaaagagtgagcagggacctgtcttcaggtgttggctagagtgaacagtaaattcttttggcagtctggagtttgtttttcaggcagacgctttaaggggtcagacgccttaataatcccttttttaagggtcatcctagggatgtggtcttgaactgttataaattatgttcatgtttgtttaagtcttttaatggagaagtgggtggacagggatggacaaaatgatttgtgctgaaaatttgcagcttttataggccaaggcttcagtagacaacagagcttacaggaggccaactcaaatttggtcaaggagagaatccttgtcagtaatttcagctctgatagtgtatcagagtatacccagaaagataagattgtggacttcctgctactctccctttaggaggaagaatgtgtgagaatgaacaaggaaacgaataaatggggttgttatacattgcagtaagtgcctttaaggaaatgaatggataatgagatagaatgattagaagagacattttagataaagaaatcagtaaggtttgtctgagttgacatttgagttgagaccaaagtttgagaaagattcagccctgtaaagaactagtagaagcatgtttcagaaagaagaaacagaacatatagtggtctgagttgggaaaaaggttagcgtgattgggctgcagaaagtgaagcctgttccccaaggggcgcatggaaaggagcactggttacacaactggaagtgcccagtgcaaaatgaaactggggggccccttgtttaacaattattaagacttccgagttggcaacatcagaggagtaaatgaagttcaaagcccttctgattgtagggccctgtacaactgcataagtgcaatagttcaaagcccttctgattgtagggccctgtacaactgcataagtgcaatatctttgaagctcaccctgaggctgggaaagaggtgggtgtaaccagggaacagaaagaaaccaggacaaatttgacaaaagagagacaatagtaggagatggaattaaaaagaaaggcaactatcagattgtatagaaccctggggatcattgtaaggaatttggattgggggaaaatatcatagtaatatttacatgaatagctattatagaagtttagaaaactgattataaaatgctagtatcaaaatatcataaagtaaatatatgttgttatagtaaagatatataaaattactatttttcttggtcttgaacatataataattcttaatggctttacaaaatacctaaacaatttgaaacccacatatcttcaacagttgtcatgcagtaggtgcatacttaagaatcactgatacacatatgaattccactctccaactaccaattttaaatgaaatctgtaagttacccaaaactgttcttgttgcatagtctttcaaaagtcactgtttatcatttccaagattgcagcttatcctgcattatacaaggatagcttcatttttcaagacatcctttgcccatttctgaggctttgtagtgatcttatcaacagcctacttataaatcatctgtatgacaggtcactttctgcatttgaccctacaactttttgtaaaataactagaaatatatgtaaattgaatctttaaaaagatacttgcatttaatagcaatgaatgatctgattgctattattgtagcattaatgtctttccattcattctctgaagccacagagaaagatgcatctctttacaactaaactaatcagacctattccaactggaccccattttactattggaattgttcttatattcattcccttcatgtgtaatctttgtgcaataattaagtcaccattagcttgaagaaacctttgcttgctcactcttgtgcctaaaccaggtatcaagtctggacatatttctctctcattcgaaatacaaattttagatgtactatattctcaatgtagaaaacaggaaaaatataaatgcaagtattcagaaatcattgctttctgaaatttctttctgttcacccacattctttacatttgctctactcttttaagttttatttatggttcatccatcttttactcaacatttcctaaagtcgtttcatgtctgccttagaaaatgaactcaagtgtgaatttgtttggtacagtgataataagcaacacttgagtgttaaatggatcagaccttcccatatggaccttgatgtttgcattcctcagactgcatctccctttttagttaagaagatgctccagtcaccttactgacttcatctctttccttttcaaagtcctttacagctgactctgaatgtttctatttttaagagctttctgcaatttagaaaccttattttaaatccacaaagcaccctaaatattttgccaatatatctgcttatgatttatggtaatgttttcctttagctgtaagaagactaatggtatatgaatgaactatcatgactcatgaaagtattttatgatattgataatttatatatgtatatataaattatctgaagaaatgtagcagaatttttatttctctaggaaatgattttttgtcttatttccccctactattctataatccaaatttgtacatttaagaattctttcattaggcttaataagagttgatcttcaagagacagcatgacacagatgatatttaatgcctgtcatcattctgtctccatatgtccaaatcccaccttctcacaaaaacagctcaactcccactttgtgtgtgaaatctctcccagctcctccagttttaccctcatcaaagcacttagttcaggggcctctgccaatagcctctactttaccaattaggatttgattctatgttcccttgtatcattttctaactgtggtgtttttgtcttctcaattatctttttacctccttgaggactgggatgacttttatacttttctccctgtgttagttaaatttgcctcataaaagccagatgagctcgtatctgactttataaatactagttatagaatattaaagctggaattaaagctctaagagatcatctaacttatctttattttgaagaaaaaactaagtcttagagaaggtaagtgatttgtgcaaagttaatggtatggatttagtgacttaactccattagggaaatacacacacacacacgcagttagcacattggaaaataggggtttgtgtatatccttgctggaatattatgtttgttgaatacccttttacataccaggcattttgctaggagttggaaatagagagaaaatttcatgaaggagaaaaaatacctctatgtggagaaattcaacaagactgtaatattttttagaatgattaagcttatgaatcaagagagtagtcaatttttttttgtattatccatgcattaaacctttgaattcagggattatcattttttaaataaatagttatatcttatattaaagatgttca

SEQ ID NO: 342 - DNA, 4063 bp, Homo sapiens
atgattacatttcaaagaaatggttttcagatccttgagaaagacactcctgagttgttggagatacatccacatctcaaagggacagaggaaggattccccattgtaaaccctttccagtaaatgccctaagaaagagtgagcagggacctgtcttcaggtgttggctagagtgaacagtaaattcttttggcagtctggagtttgtttttcaggcagacgctttaaggggtcagacgccttaataatcccttttttaagggtcatcctagggatgtggtcttgaactgttataaattatgttcatgtttgtttaagtcttttaatggagaagtgggtggacagggatggacaaaatgatttgtgctgaaaatttgcagcttttataggccaaggcttcagtagacaacagagcttacaggaggccaactcaaatttggtcaaggagagaatccttgtcagtaatttcagctctgatagtgtatcagagtatacccagaaagataagattgtggacttcctgctactctccctttaggaggaagaatgtgtgagaatgaacaaggaaacgaataaatggggttgttatacattgcagtaagtgcctttaaggaaatgaatggataatgagatagaatgattagaagagacattttagataaagaaatcagtaaggtttgtctgagttgacatttgagttgagaccaaagtttgagaaagattcagccctgtaaagaactagtagaagcatgtttcagaaagaagaaacagaacatatagtggtctgagttgggaaaaaggttagcgtgattgggctgcagaaagtgaagcctgttccccaaggggcgcatggaaaggagcactggttacacaactggaagtgcccagtgcaaaatgaaactggggggccccttgtttaacaattattaagacttccgagttggcaacatcagaggagtaaatgaagttcaaagcccttctgattgtagggccctgtacaactgcataagtgcaatagttcaaagcccttctgattgtagggccctgtacaactgcataagtgcaatatctttgaagctcaccctgaggctgggaaagaggtgggtgtaaccagggaacagaaagaaaccaggacaaatttgacaaaagagagacaatagtaggagatggaattaaaaagaaaggcaactatcagattgtatagaaccctggggatcattgtaaggaatttggattgggggaaaatatcatagtaatatttacatgaatagctattatagaagtttagaaaactgattataaaatgctagtatcaaaatatcataaagtaaatatatgttgttatagtaaagatatataaaattactatttttcttggtcttgaacatataataattcttaatggctttacaaaatacctaaacaatttgaaacccacatatcttcaacagttgtcatgcagtaggtgcatacttaagaatcactgatacacatatgaattccactctccaactaccaattttaaatgaaatctgtaagttacccaaaactgttcttgttgcatagtctttcaaaagtcactgtttatcatttccaagattgcagcttatcctgcattatacaaggatagcttcatttttcaagacatcctttgcccatttctgaggctttgtagtgatcttatcaacagcctacttataaatcatctgtatgacaggtcactttctgcatttgaccctacaactttttgtaaaataactagaaatatatgtaaattgaatctttaaaaagatacttgcatttaatagcaatgaatgatctgattgctattattgtagcattaatgtctttccattcattctctgaagccacagagaaagatgcatctctttacaactaaactaatcagacctattccaactggaccccattttactattggaattgttcttatattcattcccttcatgtgtaatctttgtgcaataattaagtcaccattagcttgaagaaacctttgcttgctcactcttgtgcctaaaccaggtatcaagtctggacatatttctctctcattcgaaatacaaattttagatgtactatattctcaatgtagaaaacaggaaaaatataaatgcaagtattcagaaatcattgctttctgaaatttctttctgttcacccacattctttacatttgctctactcttttaagttttatttatggttcatccatcttttactcaacatttcctaaagtcgtttcatgtctgccttagaaaatgaactcaagtgtgaatttgtttggtacagtgataataagcaacacttgagtgttaaatggatcagaccttcccatatggaccttgatgtttgcattcctcagactgcatctccctttttagttaagaagatgctccagtcaccttactgacttcatctctttccttttcaaagtcctttacagctgactctgaatgtttctatttttaagagctttctgcaatttagaaaccttattttaaatccacaaagcaccctaaatattttgccaatatatctgcttatgatttatggtaatgttttcctttagctgtaagaagactaatggtatatgaatgaactatcatgactcatgaaagtattttatgatattgataatttatatatgtatatataaattatctgaagaaatgtagcagaatttttatttctctaggaaatgattttttgtcttatttccccctactattctataatccaaatttgtacatttaagaattctttcattaggcttaataagagttgatcttcaagagacagcatgacacagatgatatttaatgcctgtcatcattctgtctccatatgtccaaatcccaccttctcacaaaaacagctcaactcccactttgtgtgtgaaatctctcccagctcctccagttttaccctcatcaaagcacttagttcaggggcctctgccaatagcctctactttaccaattaggatttgattctatgttcccttgtatcattttctaactgtggtgtttttgtcttctcaattatctttttacctccttgaggactgggatgacttttatacttttctccctgtgttagttaaatttgcctcataaaagccagatgagctcgtatctgactttataaatactagttatagaatattaaagctggaattaaagctctaagagatcatctaacttatctttattttgaagaaaaaactaagtcttagagaaggtaagtgatttgtgcaaagttaatggtatggatttagtgacttaactccattagggaaatacacacacacacacgcagttagcacattggaaaataggggtttgtgtatatccttgctggaatattatgtttgttgaatacccttttacataccaggcattttgctaggagttggaaatagagagaaaatttcatgaaggagaaaaaatacctctatgtggagaaattcaacaagactgtaatattttttagaatgattaagcttatgaatcaagagagtagtcaatttttttttgtattatccatgcattaaacctttgaattcagggattatcattttttaaataaatagttatatcttatattaaagatgttcagatttaaatttcttttttatttatgatgatttaatttcatcgtgaaaattaccctactcagatcttctttaaaatcatctttgttgtaagtaaccaaaatttaattcaaattagaaacattttcatatgttgttagagcatataaaagatagtgtgtggttttgttttttgagatgagatctagtctgttagtgaatttcaagtgtattatctgtagccacaagctgtacattaggtctccagaatttattcatcatataactgaaagtttataccctttgaccagtctcttctcttttcctccaccccccagcccctggtaactaccattctactctgtgctactatgagcttgacttttttttttaaaggtcccacatataagtgagatcatgcagtatttgtctttctgtatctgggtt

SEQ ID NO: 343 - DNA, 4055 bp, Homo sapiens
ccttaataatcccttttttaagggtcatcctagggatgtggtcttgaactgttataaattatgttcatgtttgtttaagtcttttaatggagaagtgggtggacagggatggacaaaatgatttgtgctgaaaatttgcagcttttataggccaaggcttcagtagacaacagagcttacaggaggccaactcaaatttggtcaaggagagaatccttgtcagtaatttcagctctgatagtgtatcagagtatacccagaaagataagattgtggacttcctgctactctccctttaggaggaagaatgtgtgagaatgaacaaggaaacgaataaatggggttgttatacattgcagtaagtgcctttaaggaaatgaatggataatgagatagaatgattagaagagacattttagataaagaaatcagtaaggtttgtctgagttgacatttgagttgagaccaaagtttgagaaagattcagccctgtaaagaactagtagaagcatgtttcagaaagaagaaacagaacatatagtggtctgagttgggaaaaaggttagcgtgattgggctgcagaaagtgaagcctgttccccaaggggcgcatggaaaggagcactggttacacaactggaagtgcccagtgcaaaatgaaactggggggccccttgtttaacaattattaagacttccgagttggcaacatcagaggagtaaatgaagttcaaagcccttctgattgtagggccctgtacaactgcataagtgcaatagttcaaagcccttctgattgtagggccctgtacaactgcataagtgcaatatctttgaagctcaccctgaggctgggaaagaggtgggtgtaaccagggaacagaaagaaaccaggacaaatttgacaaaagagagacaatagtaggagatggaattaaaaagaaaggcaactatcagattgtatagaaccctggggatcattgtaaggaatttggattgggggaaaatatcatagtaatatttacatgaatagctattatagaagtttagaaaactgattataaaatgctagtatcaaaatatcataaagtaaatatatgttgttatagtaaagatatataaaattactatttttcttggtcttgaacatataataattcttaatggctttacaaaatacctaaacaatttgaaacccacatatcttcaacagttgtcatgcagtaggtgcatacttaagaatcactgatacacatatgaattccactctccaactaccaattttaaatgaaatctgtaagttacccaaaactgttcttgttgcatagtctttcaaaagtcactgtttatcatttccaagattgcagcttatcctgcattatacaaggatagcttcatttttcaagacatcctttgcccatttctgaggctttgtagtgatcttatcaacagcctacttataaatcatctgtatgacaggtcactttctgcatttgaccctacaactttttgtaaaataactagaaatatatgtaaattgaatctttaaaaagatacttgcatttaatagcaatgaatgatctgattgctattattgtagcattaatgtctttccattcattctctgaagccacagagaaagatgcatctctttacaactaaactaatcagacctattccaactggaccccattttactattggaattgttcttatattcattcccttcatgtgtaatctttgtgcaataattaagtcaccattagcttgaagaaacctttgcttgctcactcttgtgcctaaaccaggtatcaagtctggacatatttctctctcattcgaaatacaaattttagatgtactatattctcaatgtagaaaacaggaaaaatataaatgcaagtattcagaaatcattgctttctgaaatttctttctgttcacccacattctttacatttgctctactcttttaagttttatttatggttcatccatcttttactcaacatttcctaaagtcgtttcatgtctgccttagaaaatgaactcaagtgtgaatttgtttggtacagtgataataagcaacacttgagtgttaaatggatcagaccttcccatatggaccttgatgtttgcattcctcagactgcatctccctttttagttaagaagatgctccagtcaccttactgacttcatctctttccttttcaaagtcctttacagctgactctgaatgtttctatttttaagagctttctgcaatttagaaaccttattttaaatccacaaagcaccctaaatattttgccaatatatctgcttatgatttatggtaatgttttcctttagctgtaagaagactaatggtatatgaatgaactatcatgactcatgaaagtattttatgatattgataatttatatatgtatatataaattatctgaagaaatgtagcagaatttttatttctctaggaaatgattttttgtcttatttccccctactattctataatccaaatttgtacatttaagaattctttcattaggcttaataagagttgatcttcaagagacagcatgacacagatgatatttaatgcctgtcatcattctgtctccatatgtccaaatcccaccttctcacaaaaacagctcaactcccactttgtgtgtgaaatctctcccagctcctccagttttaccctcatcaaagcacttagttcaggggcctctgccaatagcctctactttaccaattaggatttgattctatgttcccttgtatcattttctaactgtggtgtttttgtcttctcaattatctttttacctccttgaggactgggatgacttttatacttttctccctgtgttagttaaatttgcctcataaaagccagatgagctcgtatctgactttataaatactagttatagaatattaaagctggaattaaagctctaagagatcatctaacttatctttattttgaagaaaaaactaagtcttagagaaggtaagtgatttgtgcaaagttaatggtatggatttagtgacttaactccattagggaaatacacacacacacacgcagttagcacattggaaaataggggtttgtgtatatccttgctggaatattatgtttgttgaatacccttttacataccaggcattttgctaggagttggaaatagagagaaaatttcatgaaggagaaaaaatacctctatgtggagaaattcaacaagactgtaatattttttagaatgattaagcttatgaatcaagagagtagtcaatttttttttgtattatccatgcattaaacctttgaattcagggattatcattttttaaataaatagttatatcttatattaaagatgttcagatttaaatttcttttttatttatgatgatttaatttcatcgtgaaaattaccctactcagatcttctttaaaatcatctttgttgtaagtaaccaaaatttaattcaaattagaaacattttcatatgttgttagagcatataaaagatagtgtgtggttttgttttttgagatgagatctagtctgttagtgaatttcaagtgtattatctgtagccacaagctgtacattaggtctccagaatttattcatcatataactgaaagtttataccctttgaccagtctcttctcttttcctccaccccccagcccctggtaactaccattctactctgtgctactatgagcttgacttttttttttaaaggtcccacatataagtgagatcatgcagtatttgtctttctgtatctgggttatttcacttagtataatgtcctccaggctcatctaagttattgcaaatgacagaattcccttctttttttatgactggatatatttcactgtgttttctttatccatttttctgttgtaggatacttagtttgattccatatcttggctattgtgaataatgctacagtgcacataggagtataaataccttttggagataatgattttattttctttggatatgtaccca

SEQ ID NO: 344 - DNA, 4045 bp, Homo sapiens
tgtgagaatgaacaaggaaacgaataaatggggttgttatacattgcagtaagtgcctttaaggaaatgaatggataatgagatagaatgattagaagagacattttagataaagaaatcagtaaggtttgtctgagttgacatttgagttgagaccaaagtttgagaaagattcagccctgtaaagaactagtagaagcatgtttcagaaagaagaaacagaacatatagtggtctgagttgggaaaaaggttagcgtgattgggctgcagaaagtgaagcctgttccccaaggggcgcatggaaaggagcactggttacacaactggaagtgcccagtgcaaaatgaaactggggggccccttgtttaacaattattaagacttccgagttggcaacatcagaggagtaaatgaagttcaaagcccttctgattgtagggccctgtacaactgcataagtgcaatagttcaaagcccttctgattgtagggccctgtacaactgcataagtgcaatatctttgaagctcaccctgaggctgggaaagaggtgggtgtaaccagggaacagaaagaaaccaggacaaatttgacaaaagagagacaatagtaggagatggaattaaaaagaaaggcaactatcagattgtatagaaccctggggatcattgtaaggaatttggattgggggaaaatatcatagtaatatttacatgaatagctattatagaagtttagaaaactgattataaaatgctagtatcaaaatatcataaagtaaatatatgttgttatagtaaagatatataaaattactatttttcttggtcttgaacatataataattcttaatggctttacaaaatacctaaacaatttgaaacccacatatcttcaacagttgtcatgcagtaggtgcatacttaagaatcactgatacacatatgaattccactctccaactaccaattttaaatgaaatctgtaagttacccaaaactgttcttgttgcatagtctttcaaaagtcactgtttatcatttccaagattgcagcttatcctgcattatacaaggatagcttcatttttcaagacatcctttgcccatttctgaggctttgtagtgatcttatcaacagcctacttataaatcatctgtatgacaggtcactttctgcatttgaccctacaactttttgtaaaataactagaaatatatgtaaattgaatctttaaaaagatacttgcatttaatagcaatgaatgatctgattgctattattgtagcattaatgtctttccattcattctctgaagccacagagaaagatgcatctctttacaactaaactaatcagacctattccaactggaccccattttactattggaattgttcttatattcattcccttcatgtgtaatctttgtgcaataattaagtcaccattagcttgaagaaacctttgcttgctcactcttgtgcctaaaccaggtatcaagtctggacatatttctctctcattcgaaatacaaattttagatgtactatattctcaatgtagaaaacaggaaaaatataaatgcaagtattcagaaatcattgctttctgaaatttctttctgttcacccacattctttacatttgctctactcttttaagttttatttatggttcatccatcttttactcaacatttcctaaagtcgtttcatgtctgccttagaaaatgaactcaagtgtgaatttgtttggtacagtgataataagcaacacttgagtgttaaatggatcagaccttcccatatggaccttgatgtttgcattcctcagactgcatctccctttttagttaagaagatgctccagtcaccttactgacttcatctctttccttttcaaagtcctttacagctgactctgaatgtttctatttttaagagctttctgcaatttagaaaccttattttaaatccacaaagcaccctaaatattttgccaatatatctgcttatgatttatggtaatgttttcctttagctgtaagaagactaatggtatatgaatgaactatcatgactcatgaaagtattttatgatattgataatttatatatgtatatataaattatctgaagaaatgtagcagaatttttatttctctaggaaatgattttttgtcttatttccccctactattctataatccaaatttgtacatttaagaattctttcattaggcttaataagagttgatcttcaagagacagcatgacacagatgatatttaatgcctgtcatcattctgtctccatatgtccaaatcccaccttctcacaaaaacagctcaactcccactttgtgtgtgaaatctctcccagctcctccagttttaccctcatcaaagcacttagttcaggggcctctgccaatagcctctactttaccaattaggatttgattctatgttcccttgtatcattttctaactgtggtgtttttgtcttctcaattatctttttacctccttgaggactgggatgacttttatacttttctccctgtgttagttaaatttgcctcataaaagccagatgagctcgtatctgactttataaatactagttatagaatattaaagctggaattaaagctctaagagatcatctaacttatctttattttgaagaaaaaactaagtcttagagaaggtaagtgatttgtgcaaagttaatggtatggatttagtgacttaactccattagggaaatacacacacacacacgcagttagcacattggaaaataggggtttgtgtatatccttgctggaatattatgtttgttgaatacccttttacataccaggcattttgctaggagttggaaatagagagaaaatttcatgaaggagaaaaaatacctctatgtggagaaattcaacaagactgtaatattttttagaatgattaagcttatgaatcaagagagtagtcaatttttttttgtattatccatgcattaaacctttgaattcagggattatcattttttaaataaatagttatatcttatattaaagatgttcagatttaaatttcttttttatttatgatgatttaatttcatcgtgaaaattaccctactcagatcttctttaaaatcatctttgttgtaagtaaccaaaatttaattcaaattagaaacattttcatatgttgttagagcatataaaagatagtgtgtggttttgttttttgagatgagatctagtctgttagtgaatttcaagtgtattatctgtagccacaagctgtacattaggtctccagaatttattcatcatataactgaaagtttataccctttgaccagtctcttctcttttcctccaccccccagcccctggtaactaccattctactctgtgctactatgagcttgacttttttttttaaaggtcccacatataagtgagatcatgcagtatttgtctttctgtatctgggttatttcacttagtataatgtcctccaggctcatctaagttattgcaaatgacagaattcccttctttttttatgactggatatatttcactgtgttttctttatccatttttctgttgtaggatacttagtttgattccatatcttggctattgtgaataatgctacagtgcacataggagtataaataccttttggagataatgattttattttctttggatatgtacccagaagtgggattactggatgatatgatagttctatttttaattttttaaagaacctttagattgtttttcataatgactgaaccaaagatagttctttaagttggagagttcttctttaaatttcacatgatttataaaagttcatacaattgctgacagtgagagagaagtggatagggttaaatactaaggataatggaaaatgtttagaatagctactagggtcaatcttgagtcacacagagatgagtaaactgattgctaccttgccactagagtgcagctgaggttaattgacaa

SEQ ID NO: 345 - DNA, 4047 bp, Homo sapiens
ggataatggaaaatgtttagaatagctactagggtcaatcttgagtcacacagagatgagtaaactgattgctaccttgccactagagtgcagctgaggttaattgacaaggatttgtagtttgtgactccatcattgctcagcagctttggaattaaaagatgaaaagtatatttgaaggccaagggagtgaaaaattccaaggtgttaatgatactgtggttgatttgaggtatcctcatgctgaagaaatcccaaggtgggataaagggctagacgtcaagatgatggggaaagaagaggtttatttataatataagaagtgagaagaagagtcagaagattccagtcagtgaaagattttttcaagttagagattttggactaaaagtggttttaagttatgatgaggcctggggtatggccataccccaatgtgtgactgaagtgggacatagaaggttctagaaatgagatggcttttagaaggtcatcactgcatttctagaagtgaagtgacagatgatagccctgtctggcgttgtgccatcaaaggagaggggaagggcacattggctttagtagatgaagctaaggggaaaagggtgtgtaggagaggaaaaaaatatcttcttcccatcttagtttcatagttgaggctcctgtaacaaaagacagattaacaagagaaaagcatacgaattgatttaatataaattttacattatatggaagccttcatcaggaagagaagacccaaagaaacggaagcctgtgtatttttatgcttaggtttgatgaagagtggacagttgcgtagaagtatgattgaataagaagatacgacctaatgctaatgaactaggcgaacttagcaaggcctgtttgttcagattcttttctgtgtccttctgttttcagtgataaggatgtttcttccctccaggaataaggagggcacctctcaaataagggtcttatgaccctttagggaagaaggatgggagaaggtcagagagatcttgctacgtctgctgttttctcaactgccaatgtgccatatttggaggtagtgtgtcctgaacccttgccaagtgtaaacatccttttctcttggttgttatgaaaaagagattatacagccacaaatgaaaaagatgttataggaaatggcattatcatgggagcttcgggattgattcaaggagataggttgaaatactaattatgaacaaaatgtaaggtaatgtgtaaaagaacacagaatccactgtaatggagaaagaaaggtagatagataggctgtatgcatatagtgaggtacagtaaccccatccatggagagaaaatgtgaaatagagcaaggtaatggaggaaatagtaaaaggaaagaaggaggaaataagcaaggaaaggttagccaggatagaaaggtagtttgagagacatgttagctgagggagaagagacaggatatttgcaaaattttgtagcttgaaaggtcaacagcatcagctacttccagcatttcaattgcaagggtagattcattgtcaatgtcatagtttagttgctgagctttacataggactagtttgtactggtaactttgatgagtttagtgagaagaggcaacaacaggaaaaaaatacctcaatgagaaacagcttattaaattaataccactcaaaacagatttatattgcaggttttaagcaaatacagttgttttaaaagcaagaggttcaactgtattcttgttgatattgattaatatgtagggaaataaaccaaaattacatgttttccatgagaagaatcatattttcagtgagaagaattacaattttctagtaaaaaatatcgaatttctgttttaaaagataaattgtgccttttttttatgaactatatgccattggcaaaaataaaacacacacacacacaaaacacccgaaaagaacaaagaaaaaaatctagaagcagttgttttgatcaatcctttccacccctgccagcatcaatgtacttcgtaagactataaaaatcaaatattttaaaaatgctgattcattctttggaaagctctaccttgagttagggtagtttgttttttggcagtcttgtctcttcagatgtgatgtggggtgtttgccaatatactgaaaacgcagcatcacggctgtttctctgacctcagcatcctgaagtggtgtttcagctcctgctctccttacatcgttttaccagtaggtccagtgcatttagatttgtcattagcttttaaggtgaggtttgggcaaaatccattttattttggatgacttatcatcccactgattcttgactccttggtaattctgctaatgctaatttttttagcttcatatattttcattagggcttgaaagtctctgagcttttcttactgattgcatcctatccatggcattcaaatgtgtctgaatttcaacttgttgaaatcattgaaacttaaataaaaactgagaggttgttttatagttaaaaaaaaaaaacctgttaagaatatctttaaaataagtcttgtgataatgaaatgtaccgcttagcagtatgcatgtaccagttgggactactggtttctatatttaagaagtaactcttgctaatgagggtgctgttcaacaatgattttagcacttgtgcatgatccaaatgataatgtttaattattctgtttgcgtgccaagtgactttttttatataaccttgatttgcctctttgtaagcctttgttttcctctgtatgtaacttattcatatttgtaattaacaatttaaatccactgtttggagcattaaggaattagttaatactgatatctcaagttaagaagtgactccccaaaaaaaagttgtggggagaattaaaacaaatattttctgttttgttttgtttctttatttgtggttctttatcttgttttgtttaaattgtttggtaattagaagttatttacgggatttaggttatttggtagcattgtaaatagcttcctttcatgtgttgctttgccggtctttggggataataataagagtcctttgagctgacctagtaaagccgtttattcaaggatcacttgattatgaatactgggggaagggggttagcttttctacattctagattcttctataccttatccttgctgcttcttgtgatacatattagtgaaaagggaactttcagccatgtattaatgcttttgaagttcagtagtgcatagatttcagcataaagtaagattatacagtttgcaatatgaacagggacatatagaaggatacacatgcattcatatagagatatacaaactcaagcaaaagatagagtaactctaaattatgttccatgtgatgtatctatatttgttctctgtcaaggataaaatggaagaaaattgaaaatttcctaactgtattttggttggtaaaatacaatctcaaaagtaaaaaattatttgatttcgccttaaaagtgattttgtttagggtttttctttagggttttgctacagatagatgtatcacagggtacattttataattcagtgatactttccatattttatttattcatttatattagttggtggggaacaagtaaaaaattgattaattcttattatacaggtaagttttcattgttttacggctacttaatagcagtacagtggagtaaagcacattttcagaattcacatgcccacttatctgtgtaggttcagttctaaaatgtttttcacagtgagtcactgtcattagctttccaaaaatgacaatttcaaggacagccctaatttgtacatgtgaatttttatgtgcttgttgaaaatcagtccagaggcatctggggaagatggtggtagcatggcatcagagtttttttgttgttgttgttttatttttttatttttatttttatttatttatttatttatttttttgaaatggagtttcgctcttgttgtccaagctggaagcaatggcgcaatcttggct

SEQ ID NO: 346 - DNA, 4057 bp, Homo sapiens
gcacattggctttagtagatgaagctaaggggaaaagggtgtgtaggagaggaaaaaaatatcttcttcccatcttagtttcatagttgaggctcctgtaacaaaagacagattaacaagagaaaagcatacgaattgatttaatataaattttacattatatggaagccttcatcaggaagagaagacccaaagaaacggaagcctgtgtatttttatgcttaggtttgatgaagagtggacagttgcgtagaagtatgattgaataagaagatacgacctaatgctaatgaactaggcgaacttagcaaggcctgtttgttcagattcttttctgtgtccttctgttttcagtgataaggatgtttcttccctccaggaataaggagggcacctctcaaataagggtcttatgaccctttagggaagaaggatgggagaaggtcagagagatcttgctacgtctgctgttttctcaactgccaatgtgccatatttggaggtagtgtgtcctgaacccttgccaagtgtaaacatccttttctcttggttgttatgaaaaagagattatacagccacaaatgaaaaagatgttataggaaatggcattatcatgggagcttcgggattgattcaaggagataggttgaaatactaattatgaacaaaatgtaaggtaatgtgtaaaagaacacagaatccactgtaatggagaaagaaaggtagatagataggctgtatgcatatagtgaggtacagtaaccccatccatggagagaaaatgtgaaatagagcaaggtaatggaggaaatagtaaaaggaaagaaggaggaaataagcaaggaaaggttagccaggatagaaaggtagtttgagagacatgttagctgagggagaagagacaggatatttgcaaaattttgtagcttgaaaggtcaacagcatcagctacttccagcatttcaattgcaagggtagattcattgtcaatgtcatagtttagttgctgagctttacataggactagtttgtactggtaactttgatgagtttagtgagaagaggcaacaacaggaaaaaaatacctcaatgagaaacagcttattaaattaataccactcaaaacagatttatattgcaggttttaagcaaatacagttgttttaaaagcaagaggttcaactgtattcttgttgatattgattaatatgtagggaaataaaccaaaattacatgttttccatgagaagaatcatattttcagtgagaagaattacaattttctagtaaaaaatatcgaatttctgttttaaaagataaattgtgccttttttttatgaactatatgccattggcaaaaataaaacacacacacacacaaaacacccgaaaagaacaaagaaaaaaatctagaagcagttgttttgatcaatcctttccacccctgccagcatcaatgtacttcgtaagactataaaaatcaaatattttaaaaatgctgattcattctttggaaagctctaccttgagttagggtagtttgttttttggcagtcttgtctcttcagatgtgatgtggggtgtttgccaatatactgaaaacgcagcatcacggctgtttctctgacctcagcatcctgaagtggtgtttcagctcctgctctccttacatcgttttaccagtaggtccagtgcatttagatttgtcattagcttttaaggtgaggtttgggcaaaatccattttattttggatgacttatcatcccactgattcttgactccttggtaattctgctaatgctaatttttttagcttcatatattttcattagggcttgaaagtctctgagcttttcttactgattgcatcctatccatggcattcaaatgtgtctgaatttcaacttgttgaaatcattgaaacttaaataaaaactgagaggttgttttatagttaaaaaaaaaaaacctgttaagaatatctttaaaataagtcttgtgataatgaaatgtaccgcttagcagtatgcatgtaccagttgggactactggtttctatatttaagaagtaactcttgctaatgagggtgctgttcaacaatgattttagcacttgtgcatgatccaaatgataatgtttaattattctgtttgcgtgccaagtgactttttttatataaccttgatttgcctctttgtaagcctttgttttcctctgtatgtaacttattcatatttgtaattaacaatttaaatccactgtttggagcattaaggaattagttaatactgatatctcaagttaagaagtgactccccaaaaaaaagttgtggggagaattaaaacaaatattttctgttttgttttgtttctttatttgtggttctttatcttgttttgtttaaattgtttggtaattagaagttatttacgggatttaggttatttggtagcattgtaaatagcttcctttcatgtgttgctttgccggtctttggggataataataagagtcctttgagctgacctagtaaagccgtttattcaaggatcacttgattatgaatactgggggaagggggttagcttttctacattctagattcttctataccttatccttgctgcttcttgtgatacatattagtgaaaagggaactttcagccatgtattaatgcttttgaagttcagtagtgcatagatttcagcataaagtaagattatacagtttgcaatatgaacagggacatatagaaggatacacatgcattcatatagagatatacaaactcaagcaaaagatagagtaactctaaattatgttccatgtgatgtatctatatttgttctctgtcaaggataaaatggaagaaaattgaaaatttcctaactgtattttggttggtaaaatacaatctcaaaagtaaaaaattatttgatttcgccttaaaagtgattttgtttagggtttttctttagggttttgctacagatagatgtatcacagggtacattttataattcagtgatactttccatattttatttattcatttatattagttggtggggaacaagtaaaaaattgattaattcttattatacaggtaagttttcattgttttacggctacttaatagcagtacagtggagtaaagcacattttcagaattcacatgcccacttatctgtgtaggttcagttctaaaatgtttttcacagtgagtcactgtcattagctttccaaaaatgacaatttcaaggacagccctaatttgtacatgtgaatttttatgtgcttgttgaaaatcagtccagaggcatctggggaagatggtggtagcatggcatcagagtttttttgttgttgttgttttatttttttatttttatttttatttatttatttatttatttttttgaaatggagtttcgctcttgttgtccaagctggaagcaatggcgcaatcttggctcactgcaacctctgcctcccgggttcaagtgattctcctgccttagcctcctgagtagctgggattccaggcatgtgccaccacgcccagctaatttttgcatttttagtagagacggggtttcaccttgttagccaggatgatctcgatctcctgacctcgtgatccgcccgcctcggcctccccaaagtgctgggattacaggcatgggccaccacacctggcccagagtttttccatgtcttttgcctttgccattttccttccattggtaaagcagttacatttataaagagacatttgtaaagagaataactagacagcaaaactaaaacgtacaatgtttgcaaccaaactagatgacaagagagatccaaaataaatccaggtggcgataagccaccaccagccacaaaacgtacaagacatcactgcctgtatgagaggaaagacaaggaagtgagggtgcctaagaaccagatagcccccaaaataggcaacagatatttaatggaaagctggcttgagagcagagctaaacctggaagggttttgccatgcgcagaggctagggtaa

SEQ ID NO: 347 - DNA, 4023 bp, Homo sapiens
aaaggtagtttgagagacatgttagctgagggagaagagacaggatatttgcaaaattttgtagcttgaaaggtcaacagcatcagctacttccagcatttcaattgcaagggtagattcattgtcaatgtcatagtttagttgctgagctttacataggactagtttgtactggtaactttgatgagtttagtgagaagaggcaacaacaggaaaaaaatacctcaatgagaaacagcttattaaattaataccactcaaaacagatttatattgcaggttttaagcaaatacagttgttttaaaagcaagaggttcaactgtattcttgttgatattgattaatatgtagggaaataaaccaaaattacatgttttccatgagaagaatcatattttcagtgagaagaattacaattttctagtaaaaaatatcgaatttctgttttaaaagataaattgtgccttttttttatgaactatatgccattggcaaaaataaaacacacacacacacaaaacacccgaaaagaacaaagaaaaaaatctagaagcagttgttttgatcaatcctttccacccctgccagcatcaatgtacttcgtaagactataaaaatcaaatattttaaaaatgctgattcattctttggaaagctctaccttgagttagggtagtttgttttttggcagtcttgtctcttcagatgtgatgtggggtgtttgccaatatactgaaaacgcagcatcacggctgtttctctgacctcagcatcctgaagtggtgtttcagctcctgctctccttacatcgttttaccagtaggtccagtgcatttagatttgtcattagcttttaaggtgaggtttgggcaaaatccattttattttggatgacttatcatcccactgattcttgactccttggtaattctgctaatgctaatttttttagcttcatatattttcattagggcttgaaagtctctgagcttttcttactgattgcatcctatccatggcattcaaatgtgtctgaatttcaacttgttgaaatcattgaaacttaaataaaaactgagaggttgttttatagttaaaaaaaaaaaacctgttaagaatatctttaaaataagtcttgtgataatgaaatgtaccgcttagcagtatgcatgtaccagttgggactactggtttctatatttaagaagtaactcttgctaatgagggtgctgttcaacaatgattttagcacttgtgcatgatccaaatgataatgtttaattattctgtttgcgtgccaagtgactttttttatataaccttgatttgcctctttgtaagcctttgttttcctctgtatgtaacttattcatatttgtaattaacaatttaaatccactgtttggagcattaaggaattagttaatactgatatctcaagttaagaagtgactccccaaaaaaaagttgtggggagaattaaaacaaatattttctgttttgttttgtttctttatttgtggttctttatcttgttttgtttaaattgtttggtaattagaagttatttacgggatttaggttatttggtagcattgtaaatagcttcctttcatgtgttgctttgccggtctttggggataataataagagtcctttgagctgacctagtaaagccgtttattcaaggatcacttgattatgaatactgggggaagggggttagcttttctacattctagattcttctataccttatccttgctgcttcttgtgatacatattagtgaaaagggaactttcagccatgtattaatgcttttgaagttcagtagtgcatagatttcagcataaagtaagattatacagtttgcaatatgaacagggacatatagaaggatacacatgcattcatatagagatatacaaactcaagcaaaagatagagtaactctaaattatgttccatgtgatgtatctatatttgttctctgtcaaggataaaatggaagaaaattgaaaatttcctaactgtattttggttggtaaaatacaatctcaaaagtaaaaaattatttgatttcgccttaaaagtgattttgtttagggtttttctttagggttttgctacagatagatgtatcacagggtacattttataattcagtgatactttccatattttatttattcatttatattagttggtggggaacaagtaaaaaattgattaattcttattatacaggtaagttttcattgttttacggctacttaatagcagtacagtggagtaaagcacattttcagaattcacatgcccacttatctgtgtaggttcagttctaaaatgtttttcacagtgagtcactgtcattagctttccaaaaatgacaatttcaaggacagccctaatttgtacatgtgaatttttatgtgcttgttgaaaatcagtccagaggcatctggggaagatggtggtagcatggcatcagagtttttttgttgttgttgttttatttttttatttttatttttatttatttatttatttatttttttgaaatggagtttcgctcttgttgtccaagctggaagcaatggcgcaatcttggctcactgcaacctctgcctcccgggttcaagtgattctcctgccttagcctcctgagtagctgggattccaggcatgtgccaccacgcccagctaatttttgcatttttagtagagacggggtttcaccttgttagccaggatgatctcgatctcctgacctcgtgatccgcccgcctcggcctccccaaagtgctgggattacaggcatgggccaccacacctggcccagagtttttccatgtcttttgcctttgccattttccttccattggtaaagcagttacatttataaagagacatttgtaaagagaataactagacagcaaaactaaaacgtacaatgtttgcaaccaaactagatgacaagagagatccaaaataaatccaggtggcgataagccaccaccagccacaaaacgtacaagacatcactgcctgtatgagaggaaagacaaggaagtgagggtgcctaagaaccagatagcccccaaaataggcaacagatatttaatggaaagctggcttgagagcagagctaaacctggaagggttttgccatgcgcagaggctagggtaaaaaaggtgtgacatttctagaatgctcttgcctgctgtgagctctcagactggacccatcagggcttccttctagaaagaaggtctcatgctgagcaaaacttctgggaatagaatcaatatggagcatctcaaggcaacagaaatgaaaggagaaggcctagtccaaactgttcctacgtgctggtagagggtatgggggaacaggaccaggaagtctcaaactcaagtactgctatgaatggaatgtttatgtcccccaaaaattcatgggttgaaatctaatccctagtgtgatagtgttaggagatggggccttggaagtgattaggtcatgaggatggagctgtcataaatgaaattagtacattcataaaagtgaccccagagagctctctcttcccttccaccatgggaggacgcagtgagaagacggctgtgtatgacccaggaagcagactcactggaccacagatctaccaatcctttgatcttggacttgccagtctccagaactgtgagagataaatctctgctgttttatttaagccactcagtctatagtattctgttatagcagactgaatagattgagacacatgctgtaattgtaaataccacacaaaagcaaaagaagaggaatctctgtgaagttagaaaagctctcctcaacctcattttgttataaaagtttaggaaaattaattatacaaccaaaaaaatgagcaacaaaagtatcaagaccaaatctcatataaaggaattttaagaaaaagagataaggaacaaaattatatcactacaaataaagcatgccagtgtaactact

SEQ ID NO: 348 - DNA, 4072 bp, Homo sapiens
aactgtattcttgttgatattgattaatatgtagggaaataaaccaaaattacatgttttccatgagaagaatcatattttcagtgagaagaattacaattttctagtaaaaaatatcgaatttctgttttaaaagataaattgtgccttttttttatgaactatatgccattggcaaaaataaaacacacacacacacaaaacacccgaaaagaacaaagaaaaaaatctagaagcagttgttttgatcaatcctttccacccctgccagcatcaatgtacttcgtaagactataaaaatcaaatattttaaaaatgctgattcattctttggaaagctctaccttgagttagggtagtttgttttttggcagtcttgtctcttcagatgtgatgtggggtgtttgccaatatactgaaaacgcagcatcacggctgtttctctgacctcagcatcctgaagtggtgtttcagctcctgctctccttacatcgttttaccagtaggtccagtgcatttagatttgtcattagcttttaaggtgaggtttgggcaaaatccattttattttggatgacttatcatcccactgattcttgactccttggtaattctgctaatgctaatttttttagcttcatatattttcattagggcttgaaagtctctgagcttttcttactgattgcatcctatccatggcattcaaatgtgtctgaatttcaacttgttgaaatcattgaaacttaaataaaaactgagaggttgttttatagttaaaaaaaaaaaacctgttaagaatatctttaaaataagtcttgtgataatgaaatgtaccgcttagcagtatgcatgtaccagttgggactactggtttctatatttaagaagtaactcttgctaatgagggtgctgttcaacaatgattttagcacttgtgcatgatccaaatgataatgtttaattattctgtttgcgtgccaagtgactttttttatataaccttgatttgcctctttgtaagcctttgttttcctctgtatgtaacttattcatatttgtaattaacaatttaaatccactgtttggagcattaaggaattagttaatactgatatctcaagttaagaagtgactccccaaaaaaaagttgtggggagaattaaaacaaatattttctgttttgttttgtttctttatttgtggttctttatcttgttttgtttaaattgtttggtaattagaagttatttacgggatttaggttatttggtagcattgtaaatagcttcctttcatgtgttgctttgccggtctttggggataataataagagtcctttgagctgacctagtaaagccgtttattcaaggatcacttgattatgaatactgggggaagggggttagcttttctacattctagattcttctataccttatccttgctgcttcttgtgatacatattagtgaaaagggaactttcagccatgtattaatgcttttgaagttcagtagtgcatagatttcagcataaagtaagattatacagtttgcaatatgaacagggacatatagaaggatacacatgcattcatatagagatatacaaactcaagcaaaagatagagtaactctaaattatgttccatgtgatgtatctatatttgttctctgtcaaggataaaatggaagaaaattgaaaatttcctaactgtattttggttggtaaaatacaatctcaaaagtaaaaaattatttgatttcgccttaaaagtgattttgtttagggtttttctttagggttttgctacagatagatgtatcacagggtacattttataattcagtgatactttccatattttatttattcatttatattagttggtggggaacaagtaaaaaattgattaattcttattatacaggtaagttttcattgttttacggctacttaatagcagtacagtggagtaaagcacattttcagaattcacatgcccacttatctgtgtaggttcagttctaaaatgtttttcacagtgagtcactgtcattagctttccaaaaatgacaatttcaaggacagccctaatttgtacatgtgaatttttatgtgcttgttgaaaatcagtccagaggcatctggggaagatggtggtagcatggcatcagagtttttttgttgttgttgttttatttttttatttttatttttatttatttatttatttatttttttgaaatggagtttcgctcttgttgtccaagctggaagcaatggcgcaatcttggctcactgcaacctctgcctcccgggttcaagtgattctcctgccttagcctcctgagtagctgggattccaggcatgtgccaccacgcccagctaatttttgcatttttagtagagacggggtttcaccttgttagccaggatgatctcgatctcctgacctcgtgatccgcccgcctcggcctccccaaagtgctgggattacaggcatgggccaccacacctggcccagagtttttccatgtcttttgcctttgccattttccttccattggtaaagcagttacatttataaagagacatttgtaaagagaataactagacagcaaaactaaaacgtacaatgtttgcaaccaaactagatgacaagagagatccaaaataaatccaggtggcgataagccaccaccagccacaaaacgtacaagacatcactgcctgtatgagaggaaagacaaggaagtgagggtgcctaagaaccagatagcccccaaaataggcaacagatatttaatggaaagctggcttgagagcagagctaaacctggaagggttttgccatgcgcagaggctagggtaaaaaaggtgtgacatttctagaatgctcttgcctgctgtgagctctcagactggacccatcagggcttccttctagaaagaaggtctcatgctgagcaaaacttctgggaatagaatcaatatggagcatctcaaggcaacagaaatgaaaggagaaggcctagtccaaactgttcctacgtgctggtagagggtatgggggaacaggaccaggaagtctcaaactcaagtactgctatgaatggaatgtttatgtcccccaaaaattcatgggttgaaatctaatccctagtgtgatagtgttaggagatggggccttggaagtgattaggtcatgaggatggagctgtcataaatgaaattagtacattcataaaagtgaccccagagagctctctcttcccttccaccatgggaggacgcagtgagaagacggctgtgtatgacccaggaagcagactcactggaccacagatctaccaatcctttgatcttggacttgccagtctccagaactgtgagagataaatctctgctgttttatttaagccactcagtctatagtattctgttatagcagactgaatagattgagacacatgctgtaattgtaaataccacacaaaagcaaaagaagaggaatctctgtgaagttagaaaagctctcctcaacctcattttgttataaaagtttaggaaaattaattatacaaccaaaaaaatgagcaacaaaagtatcaagaccaaatctcatataaaggaattttaagaaaaagagataaggaacaaaattatatcactacaaataaagcatgccagtgtaactactttatgaatgggaggaaaatggaaaagtaaatctatattttaatgttttcactaatcatgtgggtggtagtattggtattagtgttctaagactattgtgtacgtaatatgataaaaagcaaatgaataattatgggattgtctaggtctatcatctcttgtgtccttgagaaccagatttttggttttgaaaaaaggagatagaggtgtattagaaaacaagttaagttaaatcagaaatttgaattggaatcatcaatgtaacttcaagagaaattttaccttcaaatgcatatttcccagctctgtgcaaagaaaaagcctgttaacactgaaaaggcctaaaaggtgtgcttggaacatcttgt

SEQ ID NO: 349 - DNA, 4046 bp, Homo sapiens
attgaaacttaaataaaaactgagaggttgttttatagttaaaaaaaaaaaacctgttaagaatatctttaaaataagtcttgtgataatgaaatgtaccgcttagcagtatgcatgtaccagttgggactactggtttctatatttaagaagtaactcttgctaatgagggtgctgttcaacaatgattttagcacttgtgcatgatccaaatgataatgtttaattattctgtttgcgtgccaagtgactttttttatataaccttgatttgcctctttgtaagcctttgttttcctctgtatgtaacttattcatatttgtaattaacaatttaaatccactgtttggagcattaaggaattagttaatactgatatctcaagttaagaagtgactccccaaaaaaaagttgtggggagaattaaaacaaatattttctgttttgttttgtttctttatttgtggttctttatcttgttttgtttaaattgtttggtaattagaagttatttacgggatttaggttatttggtagcattgtaaatagcttcctttcatgtgttgctttgccggtctttggggataataataagagtcctttgagctgacctagtaaagccgtttattcaaggatcacttgattatgaatactgggggaagggggttagcttttctacattctagattcttctataccttatccttgctgcttcttgtgatacatattagtgaaaagggaactttcagccatgtattaatgcttttgaagttcagtagtgcatagatttcagcataaagtaagattatacagtttgcaatatgaacagggacatatagaaggatacacatgcattcatatagagatatacaaactcaagcaaaagatagagtaactctaaattatgttccatgtgatgtatctatatttgttctctgtcaaggataaaatggaagaaaattgaaaatttcctaactgtattttggttggtaaaatacaatctcaaaagtaaaaaattatttgatttcgccttaaaagtgattttgtttagggtttttctttagggttttgctacagatagatgtatcacagggtacattttataattcagtgatactttccatattttatttattcatttatattagttggtggggaacaagtaaaaaattgattaattcttattatacaggtaagttttcattgttttacggctacttaatagcagtacagtggagtaaagcacattttcagaattcacatgcccacttatctgtgtaggttcagttctaaaatgtttttcacagtgagtcactgtcattagctttccaaaaatgacaatttcaaggacagccctaatttgtacatgtgaatttttatgtgcttgttgaaaatcagtccagaggcatctggggaagatggtggtagcatggcatcagagtttttttgttgttgttgttttatttttttatttttatttttatttatttatttatttatttttttgaaatggagtttcgctcttgttgtccaagctggaagcaatggcgcaatcttggctcactgcaacctctgcctcccgggttcaagtgattctcctgccttagcctcctgagtagctgggattccaggcatgtgccaccacgcccagctaatttttgcatttttagtagagacggggtttcaccttgttagccaggatgatctcgatctcctgacctcgtgatccgcccgcctcggcctccccaaagtgctgggattacaggcatgggccaccacacctggcccagagtttttccatgtcttttgcctttgccattttccttccattggtaaagcagttacatttataaagagacatttgtaaagagaataactagacagcaaaactaaaacgtacaatgtttgcaaccaaactagatgacaagagagatccaaaataaatccaggtggcgataagccaccaccagccacaaaacgtacaagacatcactgcctgtatgagaggaaagacaaggaagtgagggtgcctaagaaccagatagcccccaaaataggcaacagatatttaatggaaagctggcttgagagcagagctaaacctggaagggttttgccatgcgcagaggctagggtaaaaaaggtgtgacatttctagaatgctcttgcctgctgtgagctctcagactggacccatcagggcttccttctagaaagaaggtctcatgctgagcaaaacttctgggaatagaatcaatatggagcatctcaaggcaacagaaatgaaaggagaaggcctagtccaaactgttcctacgtgctggtagagggtatgggggaacaggaccaggaagtctcaaactcaagtactgctatgaatggaatgtttatgtcccccaaaaattcatgggttgaaatctaatccctagtgtgatagtgttaggagatggggccttggaagtgattaggtcatgaggatggagctgtcataaatgaaattagtacattcataaaagtgaccccagagagctctctcttcccttccaccatgggaggacgcagtgagaagacggctgtgtatgacccaggaagcagactcactggaccacagatctaccaatcctttgatcttggacttgccagtctccagaactgtgagagataaatctctgctgttttatttaagccactcagtctatagtattctgttatagcagactgaatagattgagacacatgctgtaattgtaaataccacacaaaagcaaaagaagaggaatctctgtgaagttagaaaagctctcctcaacctcattttgttataaaagtttaggaaaattaattatacaaccaaaaaaatgagcaacaaaagtatcaagaccaaatctcatataaaggaattttaagaaaaagagataaggaacaaaattatatcactacaaataaagcatgccagtgtaactactttatgaatgggaggaaaatggaaaagtaaatctatattttaatgttttcactaatcatgtgggtggtagtattggtattagtgttctaagactattgtgtacgtaatatgataaaaagcaaatgaataattatgggattgtctaggtctatcatctcttgtgtccttgagaaccagatttttggttttgaaaaaaggagatagaggtgtattagaaaacaagttaagttaaatcagaaatttgaattggaatcatcaatgtaacttcaagagaaattttaccttcaaatgcatatttcccagctctgtgcaaagaaaaagcctgttaacactgaaaaggcctaaaaggtgtgcttggaacatcttgtaatagtagctaataaggaagctgttgaagactgttagagtcacattaaaagttgccaactgaacttgaccttcaataatgagaattgcaatagattgaaacccatcaaatacattaaaatctcatgatatttaaaatgaacaaaagcattgatcatctttggaaaataataggaaaccatttcatgatactgaaaattagtcaacacagtaaaatatttatcctgacttttctaaatgaactgtaccacagagtacctaaatgttagacatggtgatgtttctttataaaagtatgtattaggcagggctgtctagagggtcagaactaataggatagatgtatatatgaatgggagtttattaaggagtattgactcacatgatcacaaggtgaagtcccacagtaggctgtctgcaagctgaagagcaaggaagccagtttgagtacccaaacctcaaaagtagagaagccgacagtgcagccttcagtctgtggccgaaggcccaagagcccctggcaaaccactggtctaacagtccaaaagttgaagaacttggagtttatgttcgagggcaggaagcttccagcacggaaaaagatgaaggccagaagactcagcaagtctgctcttccatcttctcctgcctgctttgttctagccatactggcaagtgattagatggtgcccactgattagatggtacccaccg

SEQ ID NO: 350 - DNA, 4101 bp, Homo sapiens
tttttttccttttctgcctggtaagagctgaatactctcaaaccgtcagatcttataacaacccttttttctccacagggtttccttgaattctttttcttttcatgaatacctttttcttctgcacttttgctttgcatttgggaagccctatatccatataactgcagatcattatgtagttaatattcagttattcaggaaaagatgggtcattgtgaatctgatggcaaagcctggtgatagcatggggctggcaccttgttgcaggttgtttgttttgtcagtgtaaaaactgatgaattttaaatgataagtagctgcggcttaatcatgtctcatctctgctttgcaagccaagagaatcaaaagttcccttaattattgactagaagcagacatgttttgatagaaggggaatggatagaaagtggcaaaactatataagggttaactcagaacttagttgttttcaaaaatagtttggtttttgtttttgtttttttcaatttttggttgggtgcagtggctcacacctgtaatcccagcactttgggaatctgaggcaggtgaatcacttgaggtcaggagtttgagaccagcctggccaacatggtgaaaccccgtctactaaaaatacaaaaattagctgggtgtggtggtgcgcacctgtagtcccagctactcaggaggctgaggcacgagaatcggctgaacttgggaggcagaggttgcagtgagctgagatcgtgccattgcatgccagcttgggcaacagagcgagactctgtctcaaaaaaataaaaaaagtttctgtctgcaaaacaagtttctgtgagtcctgggcatgcatgttgtgaaggaaaagctgaagggcagggacagggagcaggcagcaggtaagcaaatatacttatcattcagtgtctgtgattacaagaaagtttctctctccttctccccttctcctcctccgccgcctcctcctcctcctcctcctcctcctcctcctcctctctctctctctctctctctttctgtctctaagaggagggagtgaggtataatgagtggtaggttgagcagccaagttggagccagaggatcatgggcttcattaagttctgtgcaggtaatgtaaatattttaaatgcatcttcggaaggatcacagttgatatctgtattgtaaatagaaactagaattgtgatatacagtagaaaactggggcttggagaacaatagttcatgggataggatgatggggtgggtggggttgggatagtgttagtccatatcaccctaaatgattatcaaactaatcatttagaaatacctaagggaacagtgacattttataccactattaaaaatgtagttcaggtaaaataattatatgtctgcatagttgggaaaggacaaagaaattgacagtattccttcccaaacagagcaccaatgtggccctgctctttctctcttatttattgtcttacctttttccccactagaatatatgctggcttgtgtgtagccagcatcggctctatgactaatttccattaacacagcttggttaaaaccattgtggttaaaaccacaatactctgtcatcactatattaatagcaaattgaaaatttttttagtgataagaaccagccaatagtttggaaaaattagtttggaaaaatttcaaaactaattatactttttggcccaagttttaaaatattggggaaatgaactaggtatggtttattttcaacagagaatgaaaaagtataaacatatcactggatatatttagtgatgagttcttattgccaagtgttttcatgagactgctttatttcaaaaatgcataaaactaccaaaactgttgacatttaattgcatcaatttacatcggctctgattttgttatagatagttattgccttccattttactgagagaagtgtaattgttttcaaccttatagacaacatctggggaagatgtacgagacttcacaaaggtacttaagaacaagttcaggtcgaagaagtactttgccaaacaccctcgacttggttacctgcctgtccagacagttcttgaaggtgacaacttagagacgtaagtttgattttaatattaaatctagtgtgaacatttatatctgatgttgtcttttttatgttagtaacacaagagaaattgtttaataccaactgcattttagaggaggtaaattaaacttggaatcagtcttcacaacatgaatttttacaattcacttttgacaatgtcacagccaaaatttcaattttaaccttgcacatgtccttaaattttaaaaatatgtattaatatgtcaaccttaatacacactggtcatctcttttgttggtcatctcttttctttttaaaaacacttaaagtgtggcattatatagtctttcattatttattttcctttttttccccttatggggggtgttttactatttctcagagtatgttttatactctttttgcatctctttaatataaatttattaataatacttaatctgttgattcagatatttatgctaaaattctaaagtatcacattatgattctaatctattttttattgaaaatgaagacagcaaactgagatagctttatatattacataaaatagaaaaaatttattcaaagtgtataatttgagttggttagcatacatgaaagtttcaagatggtgaaattaccatgtgattataaagcaaagggaataagaatttatggcctgaagtgaaaagaaaaaaaatgtttttcaatgacccagaaaaaatgcaaagaagtaattttaagatactaaacaattatgtgttaagatccaaatagatagattttaaatctttgaattgctttttcatatgtcaggataaatattcctgctaaggccattttcttgtggttgaatcttggggaaaatgaacttttattactaatcatcaacagagtgcccagttgtatagcataatgaagttctagtcagagaaagacaccgtctcagatgactagagaagagaaactcaaaagtgtgaagttttctactttataaaaaatagagaaaattgtagtaagaagtataaaaaatgtcaagtgcaatttttgtgaaatgaaactttagccttcagattcatagttcattttattttgtacatgatagaaaatcaggaagtagtaatattttagtgctttgtgatagtcaatgtctcaaacatgtcaaaatagaagaatacagtatttggtctgcagaccaaaatagatttttttaaatccctgtagacctcaaactttgctaaatttatgtaccagtttatctcttttatttgtggaatggctaagaaatagaagaaagaacacagccaaagcataggagatacctttttccctctataggtaatgtcgtgtgtgtgtaaacagaaagaaatacaatgcaaatgcatatttagataggtccatgtataacacatacacatacaaaaggtaagaaaaaatttcaactgtgtgattactgtgcttgatatcaaactgtgtacacttaagatatattctttccacttgatatcaaactgtgtacaattaagatctgtgtctttctaaacattcttttgcatagtacaatttagaaaaagttttaataaagcaatttcaattgaaagagagctgttcgaatacattcaggaacagtagacttttggtcctctttttgatttgtgggtatgcttttgtcctttccttcaaaaggttgtgtgataatagattcttatttgtcttagtatctaatatatgtttaactgtgctgatgccttaggataaagacaaaattgtactttttttgtatcccatccagttaacctttggaatggataattctgaggcacagaattattacttggtgctttaatttacgggataatttgataggtttgaactaagcgatgtgccttttaatcttttgctaaaccattggcattttgcatcacaaatatctacacgctttacaggaatcatgcagatagatgcatattttatactcctttaaaacatttttaatttg

SEQ ID NO: 351 - DNA, 4047 bp, Homo sapiens
agaccagcctggccaacatggtgaaaccccgtctactaaaaatacaaaaattagctgggtgtggtggtgcgcacctgtagtcccagctactcaggaggctgaggcacgagaatcggctgaacttgggaggcagaggttgcagtgagctgagatcgtgccattgcatgccagcttgggcaacagagcgagactctgtctcaaaaaaataaaaaaagtttctgtctgcaaaacaagtttctgtgagtcctgggcatgcatgttgtgaaggaaaagctgaagggcagggacagggagcaggcagcaggtaagcaaatatacttatcattcagtgtctgtgattacaagaaagtttctctctccttctccccttctcctcctccgccgcctcctcctcctcctcctcctcctcctcctcctcctctctctctctctctctctctttctgtctctaagaggagggagtgaggtataatgagtggtaggttgagcagccaagttggagccagaggatcatgggcttcattaagttctgtgcaggtaatgtaaatattttaaatgcatcttcggaaggatcacagttgatatctgtattgtaaatagaaactagaattgtgatatacagtagaaaactggggcttggagaacaatagttcatgggataggatgatggggtgggtggggttgggatagtgttagtccatatcaccctaaatgattatcaaactaatcatttagaaatacctaagggaacagtgacattttataccactattaaaaatgtagttcaggtaaaataattatatgtctgcatagttgggaaaggacaaagaaattgacagtattccttcccaaacagagcaccaatgtggccctgctctttctctcttatttattgtcttacctttttccccactagaatatatgctggcttgtgtgtagccagcatcggctctatgactaatttccattaacacagcttggttaaaaccattgtggttaaaaccacaatactctgtcatcactatattaatagcaaattgaaaatttttttagtgataagaaccagccaatagtttggaaaaattagtttggaaaaatttcaaaactaattatactttttggcccaagttttaaaatattggggaaatgaactaggtatggtttattttcaacagagaatgaaaaagtataaacatatcactggatatatttagtgatgagttcttattgccaagtgttttcatgagactgctttatttcaaaaatgcataaaactaccaaaactgttgacatttaattgcatcaatttacatcggctctgattttgttatagatagttattgccttccattttactgagagaagtgtaattgttttcaaccttatagacaacatctggggaagatgtacgagacttcacaaaggtacttaagaacaagttcaggtcgaagaagtactttgccaaacaccctcgacttggttacctgcctgtccagacagttcttgaaggtgacaacttagagacgtaagtttgattttaatattaaatctagtgtgaacatttatatctgatgttgtcttttttatgttagtaacacaagagaaattgtttaataccaactgcattttagaggaggtaaattaaacttggaatcagtcttcacaacatgaatttttacaattcacttttgacaatgtcacagccaaaatttcaattttaaccttgcacatgtccttaaattttaaaaatatgtattaatatgtcaaccttaatacacactggtcatctcttttgttggtcatctcttttctttttaaaaacacttaaagtgtggcattatatagtctttcattatttattttcctttttttccccttatggggggtgttttactatttctcagagtatgttttatactctttttgcatctctttaatataaatttattaataatacttaatctgttgattcagatatttatgctaaaattctaaagtatcacattatgattctaatctattttttattgaaaatgaagacagcaaactgagatagctttatatattacataaaatagaaaaaatttattcaaagtgtataatttgagttggttagcatacatgaaagtttcaagatggtgaaattaccatgtgattataaagcaaagggaataagaatttatggcctgaagtgaaaagaaaaaaaatgtttttcaatgacccagaaaaaatgcaaagaagtaattttaagatactaaacaattatgtgttaagatccaaatagatagattttaaatctttgaattgctttttcatatgtcaggataaatattcctgctaaggccattttcttgtggttgaatcttggggaaaatgaacttttattactaatcatcaacagagtgcccagttgtatagcataatgaagttctagtcagagaaagacaccgtctcagatgactagagaagagaaactcaaaagtgtgaagttttctactttataaaaaatagagaaaattgtagtaagaagtataaaaaatgtcaagtgcaatttttgtgaaatgaaactttagccttcagattcatagttcattttattttgtacatgatagaaaatcaggaagtagtaatattttagtgctttgtgatagtcaatgtctcaaacatgtcaaaatagaagaatacagtatttggtctgcagaccaaaatagatttttttaaatccctgtagacctcaaactttgctaaatttatgtaccagtttatctcttttatttgtggaatggctaagaaatagaagaaagaacacagccaaagcataggagatacctttttccctctataggtaatgtcgtgtgtgtgtaaacagaaagaaatacaatgcaaatgcatatttagataggtccatgtataacacatacacatacaaaaggtaagaaaaaatttcaactgtgtgattactgtgcttgatatcaaactgtgtacacttaagatatattctttccacttgatatcaaactgtgtacaattaagatctgtgtctttctaaacattcttttgcatagtacaatttagaaaaagttttaataaagcaatttcaattgaaagagagctgttcgaatacattcaggaacagtagacttttggtcctctttttgatttgtgggtatgcttttgtcctttccttcaaaaggttgtgtgataatagattcttatttgtcttagtatctaatatatgtttaactgtgctgatgccttaggataaagacaaaattgtactttttttgtatcccatccagttaacctttggaatggataattctgaggcacagaattattacttggtgctttaatttacgggataatttgataggtttgaactaagcgatgtgccttttaatcttttgctaaaccattggcattttgcatcacaaatatctacacgctttacaggaatcatgcagatagatgcatattttatactcctttaaaacatttttaatttgcctttcaatgtcaaaataatcattggtgtcagtcatcctattctgagtgactctattaggtaaaaattaacagaaaagcatgccaaataattttgtgctgtgattttggggtgtaattctgaaaatgcctcgcctcaattcattcaattgaaaatgaatttatgagcattttttgtgagaggaaaacaagagaaaaaaaggaagaagtgtaagcttgcatcagatgcaccaagatcctttttggacagatttatgaactactagatatagtgggcaggttttctttttttaatcctagaccaagctctcgggatttgatatagttcacttttcggctgagccctttctagtacagggccgcttaatcttctggtgtaacaatttatgtgagtgggtaataaaaaagtttgattttgtttattctcctatttgtgggaggagaacattggagaaaaaccagcgaagtggcaaatgtgttgaagttatttatgaagctaattagaattttcttttgcttctttctttttcatccttgcaaaat

SEQ ID NO: 352 - DNA, 4056 bp, Homo sapiens
agtcaagcaatttgacagagctttcccaaggttgattaagacaaaaaaaatacacacttttcttctatttgaagttcgtggcatatgttttgctacacttgaattttggaaataatctcttaagcagttactgtttttagaaagtatatagcatatcattcacctgacatttaacatattcagggttaatgaagaacagtgacgtggaaatagtattgactaatactatgttgttttattgttattgtatctattttacacatatgtaaattaagtttactgacagtatagatattctgacaaacagtctggataaatgcctggttctgcagtgagaacacatggacacaggaaggggaacatcacacaccggagactgttgtggggtggggggaggggagagggatagcattaggagatatacctaatgctaaatgatgagttaatgggtgcagcacaccaacatggcacatgtatacatatgtaacaaacctgcatgttgtgcacatgtaccctaaaacttaaagtataataataataaaagaaaaaataaataaataaataaataaataaatgcctggttctgaaaatagatctgaagagtcttagtttttcatcccaataagataatgttcaaaagtctttgctgtgcaggcatcaacctgcacttcactataggagatgaagagaaaagtaggcattatagatacctactttctttgtctaagtaggtatgtataatagaaataggagaatcaaggagttttggaataattttgtttcaaacactgttagcttttgcagacttttatttaattaaatagctaattttctttgtactgtaaatgttctacattcatttactctccttcctcctcaaaaagctagggttggaactagcttttaattaggatcagttgttttcaaaagtatttcatggagacttgggaattcttcctaggcagtatatgacatccccagcattaagagtgacactgaatgatctggctccagacacaagcccctgagtcaagcagaacaagtttttttgcatcgattcatagtttaaacttctaaaaaacttttttttgaagaaaatgtatcatgatctcaggaagttgccttcagtgttatttatgatgtgacatttttggtgggatctaggggtggtatctaggttgcatgtttgttcaatgtgtgtgtgaggttgaggtattttgggtacatctgggtttggatgtttacatttaaaattacatgaagaacagaaaagtctaattttattgcacctctgccatcaacatataatgtagtgtttcatttttaacttcatctttctaaccaagtttcttctctaggaaaaacaaaaatatgattgcatcccccttggtatattatagaatggtatctttacattattctataattttgagttatttttgagcattctggttttttccccagtatgactgtttaaagatgtgtttgctatccttgaacaaatatcctgtaatatctgtgaaaaggcccctgcagactcttgaatacacggcgacttctctagaatacactgtgacttctgttacttttgatttccccatggtggctctcagggcaaccacatatatgagcggaagataattgagaatctccccacacccccactgcttttgtcttaaattgctctaaagtgtttgttctgtgacttttgtctccctctcccctctttgcagtcctatcacactcatcagtatgtggccagagcactatgagtgagtattcatagcccacgtgcaggagaggtgttctgatcagtggtactagcatgggggtcttactaaactcttggtctaaaataatacttctgtgttccgggtaacaatcctagtggtctgtttgcatggcagattcattacttaagtaacctaacatttctaatagtaacacctatcaatatttgggcataaaattattgctttgtttttttcttttaaagcccctcacaatctcctcaactgtttcatgatgacacccattcaagaatagaacaatatgccacacggtaagaaactttgatcagagccctccactgcactgccacccagaatgtatctatgtctaattaatctaatatcattaatataccttgatttaagaaatgcagttttgcaggagttatgattccattatatttggaatttgggctctcatattttcatgacacagtttgcactttaccaaacacctgctatatattctatgaaaagtaaacctaaccaggatgtgattctccagctaatgagaatccaaacactgtacaagcaggatttagatggtgtaaccaagtttcagtaaatgaaagtgggattgcaggtattctcaggagatggtgcacatgtgaattacaatatgtaattaaatttatgctaatgctttaggataggggtttattttagagtctctaaataatatataggctggtcttgatggtgtgcacagactttcagaaaagtggtatatactaggtgtctgtgattctagtaagtagctttgcctagaaaggttaattcaagcatcataaaaatggtaacatttgaactgggtctaggccaactagaatttctaggggaaagtcttggactaatggaataatatactcaaaagcattgagctgggaaagggcatggtttgtttactgaactgcaggtaggggaaagagaaatagatgagaaagtgaaggacacagaagttgaggtctgataatgaaaaacccagccactgaagagttggatcatgtccttagttgaagggaagtcatggagagtttttgttatgagaggaacatcattttatttgtttgagaatgtcacgctcacttagatgtagaccaactagagggttaaggaaagcctaggtctgggagctcaattagaagattaggtcagttaggagactttacaacatggcgtaagataaaggcctacaggcattaaggcagtggtgatagaaaggtagctcaacatgaaacgttttagttttacagtcgtgttaggagatttggatctttctatgttttgtcagaattttgacaatttaaaaatgattaaggatgtacgtccaattgaccatgtcctatatggccatgttgtctaacctccttatttttattttgcagactggcccagatggaaaggactaatgggtcttttctcactgatagcagctccaccacaggaagtgtgtaagtaaatcatgaaattagtgctgcctgggaaggctagttcttgtattatggctgtcagaaacaatcttcactgatgtggctctgaatcttgatcccaatcaaaattattaagtgtggttccaaaaatttctacgtagattttatgctttcaaaccatgatagtataaactcaatatgtttatttactttgtttcatataagttaatgaaaaaaatcttacatttgtcaacttatataccccacgaaaatcagattgttttatttaggataacaggtgtatatattcattccatttgtcttatatttcttattaatttaacaaaggtaatttgacagaatatgtgccctttctgtgaaatcctctttcttccactagctaacattttttccataatatctgcatttagcacctctgacccacacatacttagatatatactcctacccttcattgaaaactgttaactcctctgccaatattttattttattagcaactaagaaaagcctcattgactttagaatactaaaaagatattatatactaaaaagctttctagccaattagtttatttctgatttccccatatgtgtatattccacttggttgtggaactttctcagcaaatattttatcactgattatcccactattgtgtgtactcttacttttggaactttttattcttttttttgtgccctggaattcacatttttaatcctgaataatatctaaaagactaatactgtcaagcttatgtgactaacaaagctctattgtggtttggatctgatgggaatctgtaaagtaga

SEQ ID NO: 353 - DNA, 4048 bp, Homo sapiens
ttgttcaatgtgtgtgtgaggttgaggtattttgggtacatctgggtttggatgtttacatttaaaattacatgaagaacagaaaagtctaattttattgcacctctgccatcaacatataatgtagtgtttcatttttaacttcatctttctaaccaagtttcttctctaggaaaaacaaaaatatgattgcatcccccttggtatattatagaatggtatctttacattattctataattttgagttatttttgagcattctggttttttccccagtatgactgtttaaagatgtgtttgctatccttgaacaaatatcctgtaatatctgtgaaaaggcccctgcagactcttgaatacacggcgacttctctagaatacactgtgacttctgttacttttgatttccccatggtggctctcagggcaaccacatatatgagcggaagataattgagaatctccccacacccccactgcttttgtcttaaattgctctaaagtgtttgttctgtgacttttgtctccctctcccctctttgcagtcctatcacactcatcagtatgtggccagagcactatgagtgagtattcatagcccacgtgcaggagaggtgttctgatcagtggtactagcatgggggtcttactaaactcttggtctaaaataatacttctgtgttccgggtaacaatcctagtggtctgtttgcatggcagattcattacttaagtaacctaacatttctaatagtaacacctatcaatatttgggcataaaattattgctttgtttttttcttttaaagcccctcacaatctcctcaactgtttcatgatgacacccattcaagaatagaacaatatgccacacggtaagaaactttgatcagagccctccactgcactgccacccagaatgtatctatgtctaattaatctaatatcattaatataccttgatttaagaaatgcagttttgcaggagttatgattccattatatttggaatttgggctctcatattttcatgacacagtttgcactttaccaaacacctgctatatattctatgaaaagtaaacctaaccaggatgtgattctccagctaatgagaatccaaacactgtacaagcaggatttagatggtgtaaccaagtttcagtaaatgaaagtgggattgcaggtattctcaggagatggtgcacatgtgaattacaatatgtaattaaatttatgctaatgctttaggataggggtttattttagagtctctaaataatatataggctggtcttgatggtgtgcacagactttcagaaaagtggtatatactaggtgtctgtgattctagtaagtagctttgcctagaaaggttaattcaagcatcataaaaatggtaacatttgaactgggtctaggccaactagaatttctaggggaaagtcttggactaatggaataatatactcaaaagcattgagctgggaaagggcatggtttgtttactgaactgcaggtaggggaaagagaaatagatgagaaagtgaaggacacagaagttgaggtctgataatgaaaaacccagccactgaagagttggatcatgtccttagttgaagggaagtcatggagagtttttgttatgagaggaacatcattttatttgtttgagaatgtcacgctcacttagatgtagaccaactagagggttaaggaaagcctaggtctgggagctcaattagaagattaggtcagttaggagactttacaacatggcgtaagataaaggcctacaggcattaaggcagtggtgatagaaaggtagctcaacatgaaacgttttagttttacagtcgtgttaggagatttggatctttctatgttttgtcagaattttgacaatttaaaaatgattaaggatgtacgtccaattgaccatgtcctatatggccatgttgtctaacctccttatttttattttgcagactggcccagatggaaaggactaatgggtcttttctcactgatagcagctccaccacaggaagtgtgtaagtaaatcatgaaattagtgctgcctgggaaggctagttcttgtattatggctgtcagaaacaatcttcactgatgtggctctgaatcttgatcccaatcaaaattattaagtgtggttccaaaaatttctacgtagattttatgctttcaaaccatgatagtataaactcaatatgtttatttactttgtttcatataagttaatgaaaaaaatcttacatttgtcaacttatataccccacgaaaatcagattgttttatttaggataacaggtgtatatattcattccatttgtcttatatttcttattaatttaacaaaggtaatttgacagaatatgtgccctttctgtgaaatcctctttcttccactagctaacattttttccataatatctgcatttagcacctctgacccacacatacttagatatatactcctacccttcattgaaaactgttaactcctctgccaatattttattttattagcaactaagaaaagcctcattgactttagaatactaaaaagatattatatactaaaaagctttctagccaattagtttatttctgatttccccatatgtgtatattccacttggttgtggaactttctcagcaaatattttatcactgattatcccactattgtgtgtactcttacttttggaactttttattcttttttttgtgccctggaattcacatttttaatcctgaataatatctaaaagactaatactgtcaagcttatgtgactaacaaagctctattgtggtttggatctgatgggaatctgtaaagtagacagaaaagttgtcaaacatagtagttgggtgttttcactaaaaaaaaaaaaaaactatggagagtgctaggttaaaatacttaaagtgctcaaatatagaatattctctttccatattttctaaaacttgttttatttattatggttataaataaaagttatcaggaggtttttcaatttcaaatttcaaagattgcatcttaatacttgacagtaatgtagtagagatttatacattatcattcatgtactatgagtgtgaaacaattcccaaatcaaaataaaggtgtattcataatgtttgtttcatatttaacctactggtgtgcatttcatgtaaagtagttaagtatcttgaatctttcctaaatcaacaaatttcctcaaggctgaccatagccaaagcgttaaaggaaataaaagataataattcagaacaaaatcttacttctttaaaatgttttgtcatgccctgtgaacacagtaaaggtaatgctcaaatttagtatattgtatcttaaaataggaataaatactattttcagatttagcactgtttcagaaaagattaacattttttaaaaagaaaagaaaaaagtcagaagattaacagtcagatacattttaatatactgtcattatatatattaactcattcacccatccaacagacagttgttattaatatatacctaccatgtaatggtatgctggagccaattgtgagagctgattgttacattttcaggatgtttgtaagctgttaaacagagcctttttaaaaataatttatatacatgtatatacagttacaattaaataaattagattaaaacaaaaacaaaagtaattctcaaaactcatcacaccctaatgattttacttcatttcactaatatctatgcccttgggattatttattataaacttgtccatcctgcaacccacaggccacatgtggcccaggacagctttgaatgcagcccaacacaaattcataaactttctgaaaacattataagatttgtctgtgatttgttttttgttttttgttttttgttttttttttgcttttttagctcatcagctatcattagtgttagtgtatttaatgtgtggcccaagaaaattcttattctttcaatgtggttcctggaagccaaaagattgaatactcc

SEQ ID NO: 354 - DNA, 4400 bp, Homo sapiens
tagtgttagtgtatttaatgtgtggcccaagaaaattcttattctttcaatgtggttcctggaagccaaaagattgaatactcctgattcattatctctgtcaggtggtgtacaaatgtgtatcttttcccagttccacattcagtgaagtcatgaacttgaaattggccatgatcaaaaagtatttaaatcacagaagttgcaaatgccacaaatcaaggtctttttctcttggagaacctgttaaacatttaccaactcacgaccgccatgcacccaatactgcaataggtctatagatgcagatactgtctccatgaatcttataggctagaaaggaaatagataagtagtcctaccagaagaacatgatgaaggcatttgtggtaaacagaatgatggccccccaaagatgtccacatcctaatccctgaagcctatgaatatactactttacttggcaaaagggactttgccacaggtttttaattaaggaccttgaaatagagagattatcctggataatccagatggccccagtgtaatcccaagggtcctcataaagggtaggaaggagagccagagtcagagaaggagacgtagcaatggaggcagaggtcagagagagatctgcagatgctgctgtgttggctttgaaaatgaggaatgcaggtgacctcaaggtgctagatgatgcaaggaaacaaataatctcctatgaaccctaggatgggcattattatgagtcctattttataaacaaggaagctgacatccagaaagataaatgacatgtccctgatcacccatatatctattacaattagatacatgagtacgttcgattgactctggacaatttaaaaggaaattgatgttacgaatactacatatctttgaaggaaaaattgagcagtgacatctcaggacaggataggactcatgacggttctggggaatctcagaagtgggaacgcaaggacaattccttgggccatggctatcaggacgtctcactccatctgccatctgcccttgggtgacactggaaagaaagaatggggaggctgactgtggtttacacaggcattgcagtttgcaaatctgaaacctagaacagaacaatccttaaaagaaagaaaatcattatttttatttatgtcttgtctactttcaaaagttcattgaatgaatcacagtttttttgtcatctgatatgtactaattttgtaatctagatagtgtttactatgtgtgacttaactgtagtataattatattccatctaatgatatttccttggtgcaaacctattatttttgcaacattttctattttagcccaagacatacgattgatgtttaatgtccctgatctggtacctcatgttctatctgcatttaaagagtttgttattggtttttactatatgtaattaagaactagaatgtatctatttttatattcaacatttagacctaataatctgtgaaaaacacttaagactaaaattgtatgttttatataaatgattgttaaattcttatttttgtgaaaactgccttaactctcttccagataccataatgaaagaatgcaatgatagtggggatgataattataataatgtgttaaactctatcagcttccccagagaagtgaatctatatgtatgttgacaacaaaaatacatctcaaatctaattttggctggtttcactatggatagtcagtctccaaatctttaaaacaaaaatttacttggtattaatattaagcactgaagttaatccatgaggtcaggtgctgtagtaaatgttctgagggcataatggtggcttgtgatcttggaggaactctacgccaggatctgtggtcaaatcatggccacaagatcagccacatagcttaaagggatccaagttttcttttaattcttgttgtccttatattagttcttattttaagtcttttctttccatatttattattttcttttaggtatgttattgataggtatcatagaactaattttttgtttgtttgttttgtttgttgttttgttttgtttttgagacagagtctcactctgtcgcccaggctggagtgcagtggcacaatctcagctcactgcaaccttggcttcccgggttcaagtgattctcctgcctcagcctcccgagtagctgggattataggtgcccaccaccaagcccaactaatttttgtatttttagtagagatggggtttcaccatgttggtcaggctggtctcaagctcctgacctcaagtgatctgcccatctcgacctcccaaagtgctgggattacaggcgtgagccaccgtgcccagccaactaattgtttttttaactaatattagaataagtttacctctatttttatcgtaacacctgagattaccatctactttagttccattttgcattatccttgctcattctttctttcatatgctatgtggacaaagtgctttgcctgtacacttgaatgacctgcctggtcatatggatggataggttaggactgtagatattgctccattgtctttggacatttaatattatggaaaataggaagctaaacctttttccaccgctgaacatgatttactgttttattttgatttctggcagattgcttgtgatactttatctttaaaatacagacattttccagggatacatatgaatgtgcttcttttgttattattatttttgggtactctgtctttatagtttctatactcagatctttttcatcctgagaaatgagaaatatttacaggatgttctactgaactcttattttgctgttttattttatatctatctactatatctttacgctttgtccatttgtcctatccatatgttagagctgctcttttgtcatgttttatcacctctctcttcacatgaacttggtgaggtgcctccaggcatcgctgactttgcattgtgtaattcactgcagctcattggtgtcctggtggtgttgagacattagtcttacagcttgcttctgccccggataacacagctaggtttagggtgttggccatttacttcctatgaggaaaatatacacatacacagacccatatctccctgccagtctgtttgatttagctacatgggaaactgaggagcttttggattgctttcaaatgctgctctctgcagtggtgcagtacccatactctcttcttctcgtccttctaaacccaggaacaagcatggggttcttgcagaggttccttcattcatttcccagtgatgctgcgttttctcaggaaagggaatcaaaggataatgccgcagcttacttcaatccttaacccactggtgttccttatttccagttgctaactgtgttgtaagggtcccaccccatcctcttttaaaatttatttgataaaagcaagaaggtcaggttaggtacttattattatattgtggccttaaccaaagtatatgacctttatttaaatatatatatactcacatacacacatgttcatatctatatctatatatttctagagggagagaaaaagagagggggtttattgatgaagaaagcaaaataaatcaacaagtggcacatctgaacttttgctttggctgtttgacaagcataataccagaacgttcagttttctcaattgcttcatctagctctctgatctcaatgcttaggataaaccttttctaggaattcaccaactgtctgatacaatttcaagtcccttccttgttagagtaaactgcagtaacaccaagatgaattttcaaaccagaattacaagtaccagaggtcttccccagcatcaagtgttactcatcagctcaagggcacaggtaatctcaaggctctggtgaagctgagagaggcccaggactgccagcaccacacaccaggttctttctggctgcaacaggatgctgtctgactccagagtaacagaagaagtctctaagggatgttcgcagcccccatcgcttacacaggaaggagctgcttcagtcatgagatagccccatttgacactctgatagctacataactgacatgaggttttcctgctgccctatcctgtaaagccatcgatttccaggacttgtttaccaaaagccatcaaaacggaccacgtgccatctgctaatggactgccctgctagtattagccaggagattggtatttgcacatttataagatctcactggatctctcttgttgaaagaagataagaaattccgagtctgctagaaagcattttcttgccataaatatatcaactttgttagacattcacttatgtcagttactaattcaaccacgttactgctatgtctagttcattagacaggtagtt

SEQ ID NO: 355 - DNA, 4047 bp, Homo sapiens
gtacgttcgattgactctggacaatttaaaaggaaattgatgttacgaatactacatatctttgaaggaaaaattgagcagtgacatctcaggacaggataggactcatgacggttctggggaatctcagaagtgggaacgcaaggacaattccttgggccatggctatcaggacgtctcactccatctgccatctgcccttgggtgacactggaaagaaagaatggggaggctgactgtggtttacacaggcattgcagtttgcaaatctgaaacctagaacagaacaatccttaaaagaaagaaaatcattatttttatttatgtcttgtctactttcaaaagttcattgaatgaatcacagtttttttgtcatctgatatgtactaattttgtaatctagatagtgtttactatgtgtgacttaactgtagtataattatattccatctaatgatatttccttggtgcaaacctattatttttgcaacattttctattttagcccaagacatacgattgatgtttaatgtccctgatctggtacctcatgttctatctgcatttaaagagtttgttattggtttttactatatgtaattaagaactagaatgtatctatttttatattcaacatttagacctaataatctgtgaaaaacacttaagactaaaattgtatgttttatataaatgattgttaaattcttatttttgtgaaaactgccttaactctcttccagataccataatgaaagaatgcaatgatagtggggatgataattataataatgtgttaaactctatcagcttccccagagaagtgaatctatatgtatgttgacaacaaaaatacatctcaaatctaattttggctggtttcactatggatagtcagtctccaaatctttaaaacaaaaatttacttggtattaatattaagcactgaagttaatccatgaggtcaggtgctgtagtaaatgttctgagggcataatggtggcttgtgatcttggaggaactctacgccaggatctgtggtcaaatcatggccacaagatcagccacatagcttaaagggatccaagttttcttttaattcttgttgtccttatattagttcttattttaagtcttttctttccatatttattattttcttttaggtatgttattgataggtatcatagaactaattttttgtttgtttgttttgtttgttgttttgttttgtttttgagacagagtctcactctgtcgcccaggctggagtgcagtggcacaatctcagctcactgcaaccttggcttcccgggttcaagtgattctcctgcctcagcctcccgagtagctgggattataggtgcccaccaccaagcccaactaatttttgtatttttagtagagatggggtttcaccatgttggtcaggctggtctcaagctcctgacctcaagtgatctgcccatctcgacctcccaaagtgctgggattacaggcgtgagccaccgtgcccagccaactaattgtttttttaactaatattagaataagtttacctctatttttatcgtaacacctgagattaccatctactttagttccattttgcattatccttgctcattctttctttcatatgctatgtggacaaagtgctttgcctgtacacttgaatgacctgcctggtcatatggatggataggttaggactgtagatattgctccattgtctttggacatttaatattatggaaaataggaagctaaacctttttccaccgctgaacatgatttactgttttattttgatttctggcagattgcttgtgatactttatctttaaaatacagacattttccagggatacatatgaatgtgcttcttttgttattattatttttgggtactctgtctttatagtttctatactcagatctttttcatcctgagaaatgagaaatatttacaggatgttctactgaactcttattttgctgttttattttatatctatctactatatctttacgctttgtccatttgtcctatccatatgttagagctgctcttttgtcatgttttatcacctctctcttcacatgaacttggtgaggtgcctccaggcatcgctgactttgcattgtgtaattcactgcagctcattggtgtcctggtggtgttgagacattagtcttacagcttgcttctgccccggataacacagctaggtttagggtgttggccatttacttcctatgaggaaaatatacacatacacagacccatatctccctgccagtctgtttgatttagctacatgggaaactgaggagcttttggattgctttcaaatgctgctctctgcagtggtgcagtacccatactctcttcttctcgtccttctaaacccaggaacaagcatggggttcttgcagaggttccttcattcatttcccagtgatgctgcgttttctcaggaaagggaatcaaaggataatgccgcagcttacttcaatccttaacccactggtgttccttatttccagttgctaactgtgttgtaagggtcccaccccatcctcttttaaaatttatttgataaaagcaagaaggtcaggttaggtacttattattatattgtggccttaaccaaagtatatgacctttatttaaatatatatatactcacatacacacatgttcatatctatatctatatatttctagagggagagaaaaagagagggggtttattgatgaagaaagcaaaataaatcaacaagtggcacatctgaacttttgctttggctgtttgacaagcataataccagaacgttcagttttctcaattgcttcatctagctctctgatctcaatgcttaggataaaccttttctaggaattcaccaactgtctgatacaatttcaagtcccttccttgttagagtaaactgcagtaacaccaagatgaattttcaaaccagaattacaagtaccagaggtcttccccagcatcaagtgttactcatcagctcaagggcacaggtaatctcaaggctctggtgaagctgagagaggcccaggactgccagcaccacacaccaggttctttctggctgcaacaggatgctgtctgactccagagtaacagaagaagtctctaagggatgttcgcagcccccatcgcttacacaggaaggagctgcttcagtcatgagatagccccatttgacactctgatagctacataactgacatgaggttttcctgctgccctatcctgtaaagccatcgatttccaggacttgtttaccaaaagccatcaaaacggaccacgtgccatctgctaatggactgccctgctagtattagccaggagattggtatttgcacatttataagatctcactggatctctcttgttgaaagaagataagaaattccgagtctgctagaaagcattttcttgccataaatatatcaactttgttagacattcacttatgtcagttactaattcaaccacgttactgctatgtctagttcattagacaggtagttagataagtgggagaacccacatgcattaaatgtagtttcttgttctaatgcagagtgatcaaccctaaaaatgacctgctaataatataaagtaaaatatctgtagagacattataaatatctacaattataatttgtgctgagctatttaaataaaagaacataaggattataaaccttgtcatatgggttacaaagcatttcaaagttactttcaacgaaattctaaagacagtgaagtcagatgattcttaattcagtagtcttttaatcaactctttaggcatggagtaattgattttgtctacagtagcttttatactaaatgctgttccttatttttgttttttctgctgagtaagatatcccttctgaagtttatgagatagagctgttagatgaaagagaagcctgaaatgttgactcatgtaatatccatgctctgctagatgaacttcttcctagagttttaaaagggaggt

SEQ ID NO: 356 - DNA, 4030 bp, Homo sapiens
aattcttatttttgtgaaaactgccttaactctcttccagataccataatgaaagaatgcaatgatagtggggatgataattataataatgtgttaaactctatcagcttccccagagaagtgaatctatatgtatgttgacaacaaaaatacatctcaaatctaattttggctggtttcactatggatagtcagtctccaaatctttaaaacaaaaatttacttggtattaatattaagcactgaagttaatccatgaggtcaggtgctgtagtaaatgttctgagggcataatggtggcttgtgatcttggaggaactctacgccaggatctgtggtcaaatcatggccacaagatcagccacatagcttaaagggatccaagttttcttttaattcttgttgtccttatattagttcttattttaagtcttttctttccatatttattattttcttttaggtatgttattgataggtatcatagaactaattttttgtttgtttgttttgtttgttgttttgttttgtttttgagacagagtctcactctgtcgcccaggctggagtgcagtggcacaatctcagctcactgcaaccttggcttcccgggttcaagtgattctcctgcctcagcctcccgagtagctgggattataggtgcccaccaccaagcccaactaatttttgtatttttagtagagatggggtttcaccatgttggtcaggctggtctcaagctcctgacctcaagtgatctgcccatctcgacctcccaaagtgctgggattacaggcgtgagccaccgtgcccagccaactaattgtttttttaactaatattagaataagtttacctctatttttatcgtaacacctgagattaccatctactttagttccattttgcattatccttgctcattctttctttcatatgctatgtggacaaagtgctttgcctgtacacttgaatgacctgcctggtcatatggatggataggttaggactgtagatattgctccattgtctttggacatttaatattatggaaaataggaagctaaacctttttccaccgctgaacatgatttactgttttattttgatttctggcagattgcttgtgatactttatctttaaaatacagacattttccagggatacatatgaatgtgcttcttttgttattattatttttgggtactctgtctttatagtttctatactcagatctttttcatcctgagaaatgagaaatatttacaggatgttctactgaactcttattttgctgttttattttatatctatctactatatctttacgctttgtccatttgtcctatccatatgttagagctgctcttttgtcatgttttatcacctctctcttcacatgaacttggtgaggtgcctccaggcatcgctgactttgcattgtgtaattcactgcagctcattggtgtcctggtggtgttgagacattagtcttacagcttgcttctgccccggataacacagctaggtttagggtgttggccatttacttcctatgaggaaaatatacacatacacagacccatatctccctgccagtctgtttgatttagctacatgggaaactgaggagcttttggattgctttcaaatgctgctctctgcagtggtgcagtacccatactctcttcttctcgtccttctaaacccaggaacaagcatggggttcttgcagaggttccttcattcatttcccagtgatgctgcgttttctcaggaaagggaatcaaaggataatgccgcagcttacttcaatccttaacccactggtgttccttatttccagttgctaactgtgttgtaagggtcccaccccatcctcttttaaaatttatttgataaaagcaagaaggtcaggttaggtacttattattatattgtggccttaaccaaagtatatgacctttatttaaatatatatatactcacatacacacatgttcatatctatatctatatatttctagagggagagaaaaagagagggggtttattgatgaagaaagcaaaataaatcaacaagtggcacatctgaacttttgctttggctgtttgacaagcataataccagaacgttcagttttctcaattgcttcatctagctctctgatctcaatgcttaggataaaccttttctaggaattcaccaactgtctgatacaatttcaagtcccttccttgttagagtaaactgcagtaacaccaagatgaattttcaaaccagaattacaagtaccagaggtcttccccagcatcaagtgttactcatcagctcaagggcacaggtaatctcaaggctctggtgaagctgagagaggcccaggactgccagcaccacacaccaggttctttctggctgcaacaggatgctgtctgactccagagtaacagaagaagtctctaagggatgttcgcagcccccatcgcttacacaggaaggagctgcttcagtcatgagatagccccatttgacactctgatagctacataactgacatgaggttttcctgctgccctatcctgtaaagccatcgatttccaggacttgtttaccaaaagccatcaaaacggaccacgtgccatctgctaatggactgccctgctagtattagccaggagattggtatttgcacatttataagatctcactggatctctcttgttgaaagaagataagaaattccgagtctgctagaaagcattttcttgccataaatatatcaactttgttagacattcacttatgtcagttactaattcaaccacgttactgctatgtctagttcattagacaggtagttagataagtgggagaacccacatgcattaaatgtagtttcttgttctaatgcagagtgatcaaccctaaaaatgacctgctaataatataaagtaaaatatctgtagagacattataaatatctacaattataatttgtgctgagctatttaaataaaagaacataaggattataaaccttgtcatatgggttacaaagcatttcaaagttactttcaacgaaattctaaagacagtgaagtcagatgattcttaattcagtagtcttttaatcaactctttaggcatggagtaattgattttgtctacagtagcttttatactaaatgctgttccttatttttgttttttctgctgagtaagatatcccttctgaagtttatgagatagagctgttagatgaaagagaagcctgaaatgttgactcatgtaatatccatgctctgctagatgaacttcttcctagagttttaaaagggaggtcatggagacactgagctctaagacaaacttggcccagccactatcctgtccatcattatttctacttcctttatgtccaaaaacatcaccatccagatgtgagcctctgggtctgtttcctttgtcttgctagggaagacgagcacgccctcatccagcagtattgccaaacactcggaggagagtccccagtgagccagccgcagagcccagctcagatcctgaagtcagtagagagggaagaacgtggagaactggagaggatcattgctgacctggaggaagaacaaaggtgtgctaggcctgggagaaggaaatatgtcatcctttcttttgtatgaatttcactgtagcccccatttattctctttttcaagactattgtctaagaaatctcagtggagtgaaaattttagaggctattaacaaactgggatgctggctgcaatacagcagcatttgggggttcattgatgatgtctactgggacacttgcttaaaactacaattttattcctgcatgctcatcctgctattaatacacatttttatataagaggaactagcatgagctaaatttgaacctcacagacgattttggagagacgataatgcacgtggtagtcattctgtttctccctctttctgtattagaaatctacaggtggagtatgagcagctgaagg

SEQ ID NO: 357 - DNA, 4047 bp, Homo sapiens
gggtgttggccatttacttcctatgaggaaaatatacacatacacagacccatatctccctgccagtctgtttgatttagctacatgggaaactgaggagcttttggattgctttcaaatgctgctctctgcagtggtgcagtacccatactctcttcttctcgtccttctaaacccaggaacaagcatggggttcttgcagaggttccttcattcatttcccagtgatgctgcgttttctcaggaaagggaatcaaaggataatgccgcagcttacttcaatccttaacccactggtgttccttatttccagttgctaactgtgttgtaagggtcccaccccatcctcttttaaaatttatttgataaaagcaagaaggtcaggttaggtacttattattatattgtggccttaaccaaagtatatgacctttatttaaatatatatatactcacatacacacatgttcatatctatatctatatatttctagagggagagaaaaagagagggggtttattgatgaagaaagcaaaataaatcaacaagtggcacatctgaacttttgctttggctgtttgacaagcataataccagaacgttcagttttctcaattgcttcatctagctctctgatctcaatgcttaggataaaccttttctaggaattcaccaactgtctgatacaatttcaagtcccttccttgttagagtaaactgcagtaacaccaagatgaattttcaaaccagaattacaagtaccagaggtcttccccagcatcaagtgttactcatcagctcaagggcacaggtaatctcaaggctctggtgaagctgagagaggcccaggactgccagcaccacacaccaggttctttctggctgcaacaggatgctgtctgactccagagtaacagaagaagtctctaagggatgttcgcagcccccatcgcttacacaggaaggagctgcttcagtcatgagatagccccatttgacactctgatagctacataactgacatgaggttttcctgctgccctatcctgtaaagccatcgatttccaggacttgtttaccaaaagccatcaaaacggaccacgtgccatctgctaatggactgccctgctagtattagccaggagattggtatttgcacatttataagatctcactggatctctcttgttgaaagaagataagaaattccgagtctgctagaaagcattttcttgccataaatatatcaactttgttagacattcacttatgtcagttactaattcaaccacgttactgctatgtctagttcattagacaggtagttagataagtgggagaacccacatgcattaaatgtagtttcttgttctaatgcagagtgatcaaccctaaaaatgacctgctaataatataaagtaaaatatctgtagagacattataaatatctacaattataatttgtgctgagctatttaaataaaagaacataaggattataaaccttgtcatatgggttacaaagcatttcaaagttactttcaacgaaattctaaagacagtgaagtcagatgattcttaattcagtagtcttttaatcaactctttaggcatggagtaattgattttgtctacagtagcttttatactaaatgctgttccttatttttgttttttctgctgagtaagatatcccttctgaagtttatgagatagagctgttagatgaaagagaagcctgaaatgttgactcatgtaatatccatgctctgctagatgaacttcttcctagagttttaaaagggaggtcatggagacactgagctctaagacaaacttggcccagccactatcctgtccatcattatttctacttcctttatgtccaaaaacatcaccatccagatgtgagcctctgggtctgtttcctttgtcttgctagggaagacgagcacgccctcatccagcagtattgccaaacactcggaggagagtccccagtgagccagccgcagagcccagctcagatcctgaagtcagtagagagggaagaacgtggagaactggagaggatcattgctgacctggaggaagaacaaaggtgtgctaggcctgggagaaggaaatatgtcatcctttcttttgtatgaatttcactgtagcccccatttattctctttttcaagactattgtctaagaaatctcagtggagtgaaaattttagaggctattaacaaactgggatgctggctgcaatacagcagcatttgggggttcattgatgatgtctactgggacacttgcttaaaactacaattttattcctgcatgctcatcctgctattaatacacatttttatataagaggaactagcatgagctaaatttgaacctcacagacgattttggagagacgataatgcacgtggtagtcattctgtttctccctctttctgtattagaaatctacaggtggagtatgagcagctgaaggaccagcacctccgaagggggctccctgtcggttcaccgccagagtcgattatatctccccatcacacgtctgaggattcagaacttatagcagaagcaaaactcctcaggcagcacaaaggtcggctggaggctaggatgcagattttagaagatcacaataaacagctggagtctcagctccaccgcctccgacagctgctggagcaggtagggtgtgtagaattcagcgtcacacctccccaggccatctgtccactgccctgggagatgatggtccaggtgtcaggagaggcagagaagtccactttcaatttcttacctccgtagttaattcagactggcttagaaatttccttttacatgtaagcatataaatcctcattggcacacaaaaatgtgtttgcccagcttacaatggaatttcccagtcttctttaacaatgaagtccgcctcagctctgaactgtttgagagaaaatatcctatgacatatatcttcctaaattatacatgggaagcatctgtattaaggaacagcaagagacctgaaatcggcattctaaagctttcttccagtgagacaagaatgctgactccaagaatcattattttctattctcaagaaattgagttaaagatggttattaatttgctactattatttcctaacactggaccatgttttatgggagttgcttgcaagctttctggatgataagaaatacaatttacattaagatgaatacatgcatgtatggagaatacaaaataatacttgcctttatagagaaatgccagctcttattttctattttccctttcttcctccctccctttcttccttctgtttttctttcttaatgctggtcaggacctactaaattgattctataactcatcggtgggttattgcattcagttttgaaaaacactgttctttgagatataaaagaagcatcaatacagtttctgcctttctggtgcctgccatcttgttagagatcacagcaagatactttcatatgtgaagacacagcacactgtagggaattaagtgcttgatggcacatagtagttaggaataggagtgatgtctcagaagtagtgatggagagacctttgcagcaggtgcagagagcgtagagtcccagcacaggggccaagagctcctctctcttgaagaatccctgacatcaacatgcatgtcatctttagtctttttctctagcctgtgctgtgtggagctcctatgtgatataataggagtgcctttctccagaaatgatttattgactcaaagcaggaacaactttctctccagtgattctctcaaattttagaaaactgccttttcacagttgctctcagtctttttaacttaccagaataattcaaaacagtgtcatttctgccttacctacacagaaatttgtgtaggcaattcataatttgaccatacacttttctctatgtctctcagtgtttcagaatttgggtgaggctgttcaatggaaggcttacttcagggcctctcaatcccacaatttgg

SEQ ID NO: 358 - DNA, 4115 bp, Homo sapiens
tcatatctatatctatatatttctagagggagagaaaaagagagggggtttattgatgaagaaagcaaaataaatcaacaagtggcacatctgaacttttgctttggctgtttgacaagcataataccagaacgttcagttttctcaattgcttcatctagctctctgatctcaatgcttaggataaaccttttctaggaattcaccaactgtctgatacaatttcaagtcccttccttgttagagtaaactgcagtaacaccaagatgaattttcaaaccagaattacaagtaccagaggtcttccccagcatcaagtgttactcatcagctcaagggcacaggtaatctcaaggctctggtgaagctgagagaggcccaggactgccagcaccacacaccaggttctttctggctgcaacaggatgctgtctgactccagagtaacagaagaagtctctaagggatgttcgcagcccccatcgcttacacaggaaggagctgcttcagtcatgagatagccccatttgacactctgatagctacataactgacatgaggttttcctgctgccctatcctgtaaagccatcgatttccaggacttgtttaccaaaagccatcaaaacggaccacgtgccatctgctaatggactgccctgctagtattagccaggagattggtatttgcacatttataagatctcactggatctctcttgttgaaagaagataagaaattccgagtctgctagaaagcattttcttgccataaatatatcaactttgttagacattcacttatgtcagttactaattcaaccacgttactgctatgtctagttcattagacaggtagttagataagtgggagaacccacatgcattaaatgtagtttcttgttctaatgcagagtgatcaaccctaaaaatgacctgctaataatataaagtaaaatatctgtagagacattataaatatctacaattataatttgtgctgagctatttaaataaaagaacataaggattataaaccttgtcatatgggttacaaagcatttcaaagttactttcaacgaaattctaaagacagtgaagtcagatgattcttaattcagtagtcttttaatcaactctttaggcatggagtaattgattttgtctacagtagcttttatactaaatgctgttccttatttttgttttttctgctgagtaagatatcccttctgaagtttatgagatagagctgttagatgaaagagaagcctgaaatgttgactcatgtaatatccatgctctgctagatgaacttcttcctagagttttaaaagggaggtcatggagacactgagctctaagacaaacttggcccagccactatcctgtccatcattatttctacttcctttatgtccaaaaacatcaccatccagatgtgagcctctgggtctgtttcctttgtcttgctagggaagacgagcacgccctcatccagcagtattgccaaacactcggaggagagtccccagtgagccagccgcagagcccagctcagatcctgaagtcagtagagagggaagaacgtggagaactggagaggatcattgctgacctggaggaagaacaaaggtgtgctaggcctgggagaaggaaatatgtcatcctttcttttgtatgaatttcactgtagcccccatttattctctttttcaagactattgtctaagaaatctcagtggagtgaaaattttagaggctattaacaaactgggatgctggctgcaatacagcagcatttgggggttcattgatgatgtctactgggacacttgcttaaaactacaattttattcctgcatgctcatcctgctattaatacacatttttatataagaggaactagcatgagctaaatttgaacctcacagacgattttggagagacgataatgcacgtggtagtcattctgtttctccctctttctgtattagaaatctacaggtggagtatgagcagctgaaggaccagcacctccgaagggggctccctgtcggttcaccgccagagtcgattatatctccccatcacacgtctgaggattcagaacttatagcagaagcaaaactcctcaggcagcacaaaggtcggctggaggctaggatgcagattttagaagatcacaataaacagctggagtctcagctccaccgcctccgacagctgctggagcaggtagggtgtgtagaattcagcgtcacacctccccaggccatctgtccactgccctgggagatgatggtccaggtgtcaggagaggcagagaagtccactttcaatttcttacctccgtagttaattcagactggcttagaaatttccttttacatgtaagcatataaatcctcattggcacacaaaaatgtgtttgcccagcttacaatggaatttcccagtcttctttaacaatgaagtccgcctcagctctgaactgtttgagagaaaatatcctatgacatatatcttcctaaattatacatgggaagcatctgtattaaggaacagcaagagacctgaaatcggcattctaaagctttcttccagtgagacaagaatgctgactccaagaatcattattttctattctcaagaaattgagttaaagatggttattaatttgctactattatttcctaacactggaccatgttttatgggagttgcttgcaagctttctggatgataagaaatacaatttacattaagatgaatacatgcatgtatggagaatacaaaataatacttgcctttatagagaaatgccagctcttattttctattttccctttcttcctccctccctttcttccttctgtttttctttcttaatgctggtcaggacctactaaattgattctataactcatcggtgggttattgcattcagttttgaaaaacactgttctttgagatataaaagaagcatcaatacagtttctgcctttctggtgcctgccatcttgttagagatcacagcaagatactttcatatgtgaagacacagcacactgtagggaattaagtgcttgatggcacatagtagttaggaataggagtgatgtctcagaagtagtgatggagagacctttgcagcaggtgcagagagcgtagagtcccagcacaggggccaagagctcctctctcttgaagaatccctgacatcaacatgcatgtcatctttagtctttttctctagcctgtgctgtgtggagctcctatgtgatataataggagtgcctttctccagaaatgatttattgactcaaagcaggaacaactttctctccagtgattctctcaaattttagaaaactgccttttcacagttgctctcagtctttttaacttaccagaataattcaaaacagtgtcatttctgccttacctacacagaaatttgtgtaggcaattcataatttgaccatacacttttctctatgtctctcagtgtttcagaatttgggtgaggctgttcaatggaaggcttacttcagggcctctcaatcccacaatttggaaagtaagagtttcccaagagtgacccaagacgtgggtttcttgaagcccttcggaatgtttgagtcttacttagtgccagccacatacattgaaaacgttacatttttcattccgcgaacttgaagtttccaaatggtgctgtgtaagggatggattttctcttgcaatctcttgtttagaatatgaagtgttagtgttaacaacttagtgcataggtggaattgctacagaaggaagctgtgctcaaaacctttatttgccatggctggttgatgcccacaggagagcaaaaggcttttctgttcacccttgccttcccctactccctccatcccattagacagtgctgcctgatggctcatgtgccttgagaatcacatagcaatgcttttagagatagctaatatccaaatggcttctatatccaagactgcagagctcttatctcttctaaacaatttaggatgatgaatgctagaagtagatggaaaattcaactctaatagtaaaaactagcagaactaccaggcttca

SEQ ID NO: 359 - DNA, 4055 bp, Homo sapiens
ccagaacgttcagttttctcaattgcttcatctagctctctgatctcaatgcttaggataaaccttttctaggaattcaccaactgtctgatacaatttcaagtcccttccttgttagagtaaactgcagtaacaccaagatgaattttcaaaccagaattacaagtaccagaggtcttccccagcatcaagtgttactcatcagctcaagggcacaggtaatctcaaggctctggtgaagctgagagaggcccaggactgccagcaccacacaccaggttctttctggctgcaacaggatgctgtctgactccagagtaacagaagaagtctctaagggatgttcgcagcccccatcgcttacacaggaaggagctgcttcagtcatgagatagccccatttgacactctgatagctacataactgacatgaggttttcctgctgccctatcctgtaaagccatcgatttccaggacttgtttaccaaaagccatcaaaacggaccacgtgccatctgctaatggactgccctgctagtattagccaggagattggtatttgcacatttataagatctcactggatctctcttgttgaaagaagataagaaattccgagtctgctagaaagcattttcttgccataaatatatcaactttgttagacattcacttatgtcagttactaattcaaccacgttactgctatgtctagttcattagacaggtagttagataagtgggagaacccacatgcattaaatgtagtttcttgttctaatgcagagtgatcaaccctaaaaatgacctgctaataatataaagtaaaatatctgtagagacattataaatatctacaattataatttgtgctgagctatttaaataaaagaacataaggattataaaccttgtcatatgggttacaaagcatttcaaagttactttcaacgaaattctaaagacagtgaagtcagatgattcttaattcagtagtcttttaatcaactctttaggcatggagtaattgattttgtctacagtagcttttatactaaatgctgttccttatttttgttttttctgctgagtaagatatcccttctgaagtttatgagatagagctgttagatgaaagagaagcctgaaatgttgactcatgtaatatccatgctctgctagatgaacttcttcctagagttttaaaagggaggtcatggagacactgagctctaagacaaacttggcccagccactatcctgtccatcattatttctacttcctttatgtccaaaaacatcaccatccagatgtgagcctctgggtctgtttcctttgtcttgctagggaagacgagcacgccctcatccagcagtattgccaaacactcggaggagagtccccagtgagccagccgcagagcccagctcagatcctgaagtcagtagagagggaagaacgtggagaactggagaggatcattgctgacctggaggaagaacaaaggtgtgctaggcctgggagaaggaaatatgtcatcctttcttttgtatgaatttcactgtagcccccatttattctctttttcaagactattgtctaagaaatctcagtggagtgaaaattttagaggctattaacaaactgggatgctggctgcaatacagcagcatttgggggttcattgatgatgtctactgggacacttgcttaaaactacaattttattcctgcatgctcatcctgctattaatacacatttttatataagaggaactagcatgagctaaatttgaacctcacagacgattttggagagacgataatgcacgtggtagtcattctgtttctccctctttctgtattagaaatctacaggtggagtatgagcagctgaaggaccagcacctccgaagggggctccctgtcggttcaccgccagagtcgattatatctccccatcacacgtctgaggattcagaacttatagcagaagcaaaactcctcaggcagcacaaaggtcggctggaggctaggatgcagattttagaagatcacaataaacagctggagtctcagctccaccgcctccgacagctgctggagcaggtagggtgtgtagaattcagcgtcacacctccccaggccatctgtccactgccctgggagatgatggtccaggtgtcaggagaggcagagaagtccactttcaatttcttacctccgtagttaattcagactggcttagaaatttccttttacatgtaagcatataaatcctcattggcacacaaaaatgtgtttgcccagcttacaatggaatttcccagtcttctttaacaatgaagtccgcctcagctctgaactgtttgagagaaaatatcctatgacatatatcttcctaaattatacatgggaagcatctgtattaaggaacagcaagagacctgaaatcggcattctaaagctttcttccagtgagacaagaatgctgactccaagaatcattattttctattctcaagaaattgagttaaagatggttattaatttgctactattatttcctaacactggaccatgttttatgggagttgcttgcaagctttctggatgataagaaatacaatttacattaagatgaatacatgcatgtatggagaatacaaaataatacttgcctttatagagaaatgccagctcttattttctattttccctttcttcctccctccctttcttccttctgtttttctttcttaatgctggtcaggacctactaaattgattctataactcatcggtgggttattgcattcagttttgaaaaacactgttctttgagatataaaagaagcatcaatacagtttctgcctttctggtgcctgccatcttgttagagatcacagcaagatactttcatatgtgaagacacagcacactgtagggaattaagtgcttgatggcacatagtagttaggaataggagtgatgtctcagaagtagtgatggagagacctttgcagcaggtgcagagagcgtagagtcccagcacaggggccaagagctcctctctcttgaagaatccctgacatcaacatgcatgtcatctttagtctttttctctagcctgtgctgtgtggagctcctatgtgatataataggagtgcctttctccagaaatgatttattgactcaaagcaggaacaactttctctccagtgattctctcaaattttagaaaactgccttttcacagttgctctcagtctttttaacttaccagaataattcaaaacagtgtcatttctgccttacctacacagaaatttgtgtaggcaattcataatttgaccatacacttttctctatgtctctcagtgtttcagaatttgggtgaggctgttcaatggaaggcttacttcagggcctctcaatcccacaatttggaaagtaagagtttcccaagagtgacccaagacgtgggtttcttgaagcccttcggaatgtttgagtcttacttagtgccagccacatacattgaaaacgttacatttttcattccgcgaacttgaagtttccaaatggtgctgtgtaagggatggattttctcttgcaatctcttgtttagaatatgaagtgttagtgttaacaacttagtgcataggtggaattgctacagaaggaagctgtgctcaaaacctttatttgccatggctggttgatgcccacaggagagcaaaaggcttttctgttcacccttgccttcccctactccctccatcccattagacagtgctgcctgatggctcatgtgccttgagaatcacatagcaatgcttttagagatagctaatatccaaatggcttctatatccaagactgcagagctcttatctcttctaaacaatttaggatgatgaatgctagaagtagatggaaaattcaactctaatagtaaaaactagcagaactaccaggcttcaactaatatagatttaatggaaaaatctgcatgaaaaacttgtaacatctgcattccctatatgatg

SEQ ID NO: 360 - DNA, 4045 bp, Homo sapiens
ggatctctcttgttgaaagaagataagaaattccgagtctgctagaaagcattttcttgccataaatatatcaactttgttagacattcacttatgtcagttactaattcaaccacgttactgctatgtctagttcattagacaggtagttagataagtgggagaacccacatgcattaaatgtagtttcttgttctaatgcagagtgatcaaccctaaaaatgacctgctaataatataaagtaaaatatctgtagagacattataaatatctacaattataatttgtgctgagctatttaaataaaagaacataaggattataaaccttgtcatatgggttacaaagcatttcaaagttactttcaacgaaattctaaagacagtgaagtcagatgattcttaattcagtagtcttttaatcaactctttaggcatggagtaattgattttgtctacagtagcttttatactaaatgctgttccttatttttgttttttctgctgagtaagatatcccttctgaagtttatgagatagagctgttagatgaaagagaagcctgaaatgttgactcatgtaatatccatgctctgctagatgaacttcttcctagagttttaaaagggaggtcatggagacactgagctctaagacaaacttggcccagccactatcctgtccatcattatttctacttcctttatgtccaaaaacatcaccatccagatgtgagcctctgggtctgtttcctttgtcttgctagggaagacgagcacgccctcatccagcagtattgccaaacactcggaggagagtccccagtgagccagccgcagagcccagctcagatcctgaagtcagtagagagggaagaacgtggagaactggagaggatcattgctgacctggaggaagaacaaaggtgtgctaggcctgggagaaggaaatatgtcatcctttcttttgtatgaatttcactgtagcccccatttattctctttttcaagactattgtctaagaaatctcagtggagtgaaaattttagaggctattaacaaactgggatgctggctgcaatacagcagcatttgggggttcattgatgatgtctactgggacacttgcttaaaactacaattttattcctgcatgctcatcctgctattaatacacatttttatataagaggaactagcatgagctaaatttgaacctcacagacgattttggagagacgataatgcacgtggtagtcattctgtttctccctctttctgtattagaaatctacaggtggagtatgagcagctgaaggaccagcacctccgaagggggctccctgtcggttcaccgccagagtcgattatatctccccatcacacgtctgaggattcagaacttatagcagaagcaaaactcctcaggcagcacaaaggtcggctggaggctaggatgcagattttagaagatcacaataaacagctggagtctcagctccaccgcctccgacagctgctggagcaggtagggtgtgtagaattcagcgtcacacctccccaggccatctgtccactgccctgggagatgatggtccaggtgtcaggagaggcagagaagtccactttcaatttcttacctccgtagttaattcagactggcttagaaatttccttttacatgtaagcatataaatcctcattggcacacaaaaatgtgtttgcccagcttacaatggaatttcccagtcttctttaacaatgaagtccgcctcagctctgaactgtttgagagaaaatatcctatgacatatatcttcctaaattatacatgggaagcatctgtattaaggaacagcaagagacctgaaatcggcattctaaagctttcttccagtgagacaagaatgctgactccaagaatcattattttctattctcaagaaattgagttaaagatggttattaatttgctactattatttcctaacactggaccatgttttatgggagttgcttgcaagctttctggatgataagaaatacaatttacattaagatgaatacatgcatgtatggagaatacaaaataatacttgcctttatagagaaatgccagctcttattttctattttccctttcttcctccctccctttcttccttctgtttttctttcttaatgctggtcaggacctactaaattgattctataactcatcggtgggttattgcattcagttttgaaaaacactgttctttgagatataaaagaagcatcaatacagtttctgcctttctggtgcctgccatcttgttagagatcacagcaagatactttcatatgtgaagacacagcacactgtagggaattaagtgcttgatggcacatagtagttaggaataggagtgatgtctcagaagtagtgatggagagacctttgcagcaggtgcagagagcgtagagtcccagcacaggggccaagagctcctctctcttgaagaatccctgacatcaacatgcatgtcatctttagtctttttctctagcctgtgctgtgtggagctcctatgtgatataataggagtgcctttctccagaaatgatttattgactcaaagcaggaacaactttctctccagtgattctctcaaattttagaaaactgccttttcacagttgctctcagtctttttaacttaccagaataattcaaaacagtgtcatttctgccttacctacacagaaatttgtgtaggcaattcataatttgaccatacacttttctctatgtctctcagtgtttcagaatttgggtgaggctgttcaatggaaggcttacttcagggcctctcaatcccacaatttggaaagtaagagtttcccaagagtgacccaagacgtgggtttcttgaagcccttcggaatgtttgagtcttacttagtgccagccacatacattgaaaacgttacatttttcattccgcgaacttgaagtttccaaatggtgctgtgtaagggatggattttctcttgcaatctcttgtttagaatatgaagtgttagtgttaacaacttagtgcataggtggaattgctacagaaggaagctgtgctcaaaacctttatttgccatggctggttgatgcccacaggagagcaaaaggcttttctgttcacccttgccttcccctactccctccatcccattagacagtgctgcctgatggctcatgtgccttgagaatcacatagcaatgcttttagagatagctaatatccaaatggcttctatatccaagactgcagagctcttatctcttctaaacaatttaggatgatgaatgctagaagtagatggaaaattcaactctaatagtaaaaactagcagaactaccaggcttcaactaatatagatttaatggaaaaatctgcatgaaaaacttgtaacatctgcattccctatatgatggctcacactttctaatttgaccatatatttgtcagcgtatccatattgaagatttgcgtgagtgcctttacgaagtatttactaagtgtcaggctgttctaaccattttagaaatagtcattcttcactcccctcacaaaactctataacacagcactattattaccctccccattttacaaataaagaactgaaagcatggaaggttctacagttttcccagaattacacagcttatgagtggcagagtgggaattagaatccaggcaatctgaatccataatcatgcttctaatcactctctcaatattgccttggagtatgagctgattttgaaattggataaatttactgtattagaaacccagtgctgatgtttaaaatatgagtgaactatgcttatgaattcacttaacattaaaacaacagaaaaattgagggataaaaatggtgttgataaatgagtctggcagcataaccaagtggattcttcaaggtgtccaagcggaaagagaaggaccaaagcccccaccaagctgatgctaaaatgtatggaaaacatctgaaggcaaa

SEQ ID NO: 361 - DNA, 4053 bp, Homo sapiens
ttctataactcatcggtgggttattgcattcagttttgaaaaacactgttctttgagatataaaagaagcatcaatacagtttctgcctttctggtgcctgccatcttgttagagatcacagcaagatactttcatatgtgaagacacagcacactgtagggaattaagtgcttgatggcacatagtagttaggaataggagtgatgtctcagaagtagtgatggagagacctttgcagcaggtgcagagagcgtagagtcccagcacaggggccaagagctcctctctcttgaagaatccctgacatcaacatgcatgtcatctttagtctttttctctagcctgtgctgtgtggagctcctatgtgatataataggagtgcctttctccagaaatgatttattgactcaaagcaggaacaactttctctccagtgattctctcaaattttagaaaactgccttttcacagttgctctcagtctttttaacttaccagaataattcaaaacagtgtcatttctgccttacctacacagaaatttgtgtaggcaattcataatttgaccatacacttttctctatgtctctcagtgtttcagaatttgggtgaggctgttcaatggaaggcttacttcagggcctctcaatcccacaatttggaaagtaagagtttcccaagagtgacccaagacgtgggtttcttgaagcccttcggaatgtttgagtcttacttagtgccagccacatacattgaaaacgttacatttttcattccgcgaacttgaagtttccaaatggtgctgtgtaagggatggattttctcttgcaatctcttgtttagaatatgaagtgttagtgttaacaacttagtgcataggtggaattgctacagaaggaagctgtgctcaaaacctttatttgccatggctggttgatgcccacaggagagcaaaaggcttttctgttcacccttgccttcccctactccctccatcccattagacagtgctgcctgatggctcatgtgccttgagaatcacatagcaatgcttttagagatagctaatatccaaatggcttctatatccaagactgcagagctcttatctcttctaaacaatttaggatgatgaatgctagaagtagatggaaaattcaactctaatagtaaaaactagcagaactaccaggcttcaactaatatagatttaatggaaaaatctgcatgaaaaacttgtaacatctgcattccctatatgatggctcacactttctaatttgaccatatatttgtcagcgtatccatattgaagatttgcgtgagtgcctttacgaagtatttactaagtgtcaggctgttctaaccattttagaaatagtcattcttcactcccctcacaaaactctataacacagcactattattaccctccccattttacaaataaagaactgaaagcatggaaggttctacagttttcccagaattacacagcttatgagtggcagagtgggaattagaatccaggcaatctgaatccataatcatgcttctaatcactctctcaatattgccttggagtatgagctgattttgaaattggataaatttactgtattagaaacccagtgctgatgtttaaaatatgagtgaactatgcttatgaattcacttaacattaaaacaacagaaaaattgagggataaaaatggtgttgataaatgagtctggcagcataaccaagtggattcttcaaggtgtccaagcggaaagagaaggaccaaagcccccaccaagctgatgctaaaatgtatggaaaacatctgaaggcaaagacttctatatgatttaattatccatggtgagggcggggaagttaaaaaggaaatgtttttccttatgattatttgaatcctttctctgctttaacctctgaatgtggttccagcctgaatctgattcccgaatcaatggtgtttccccatgggcttctcctcagcattctgcactgagctactcgcttgatccagatgcctccggcccacagttccaccaggcaggtcggtgtccccagcacacagctcctctgctgagtctgctttgtgctttgccattagtttgtgtttcctgttaagtaacattcctacacactggtgccttaggaagtaaaagagttttttgtatttggtcttaaataggtgcaaatccatttcaacaatatcaaaaagcaaacattttcaaataagctataatacacttgtttatataatctgtagaagtggattgaagtttggatgaaaaagcctcctctgccctttagaatgagcaagaaattaaattatttgcttatgaatgatttttttagtacactttctgtctctaaaatgttacattggtgcatattcaggactaataatattacaccaaacattatggttgtatctgccaaggtgtggaaactcatttattcacttttcttcgtcctagtccacttagacattgtcttgcctgtcccatcagaggcagcggtcccacgcagcctgtccttggtcacaatggggacctgtcactgatgctaggaaggactcagtaaactaggtgttaaccaatgacattttgttatcaattaaattaaaattctagaattttactgagaacgatatattgtaaccaaattaatttcttggtgggatatcttttggtacattaaccagaaaaaaattaaaatattagctggatgcagtggctcccgcctgtaatcccagctctttgggaggccatggtgaaaccccatctctactaaaaatacaaaaattagccaggcgtggtggagcactcctgtagtcccagctactcgggaggctgaggcaggagaattgctggaacctgggaggcggaggttgcagtgagccgagatcgcaccaatgcactccagcctggtgacggaggctccatctcaaaaaatatatatattaaaatattaagattattttcatattttttaaataagagaactatcttgactatggattataggataaaaaacacatcctagtgaaaagtatcttaaataagatgcctttacttttgtggcaggataagctggcctaagctgaagtctccaaaaagaaaggaggacagaaaaagaaattggtgaaattttttttgtatgaaaacatacctgtggtgcaaaaataatagatttctcattcaaacactgaaataataagaccatattacttgtttttcagtctcatatttttcagtcccctggtgtgtggattctttctacacaaacaaacagctagtacgtgtcaattatgtaaaattatattaccaacactcaagcaaaaatgttttgggtatattcccctaaaattgtcctttgcaatgggaaatcttttcacattgatatttagaggctggttggagtatttcctcctgaatttgggttttagtggaaggctagacattaatttgagaagctttgttgttctctttatttgctgtcacagcgggagaggacctgctggccccaccgcacgacaccagcacggatctcacggaggtcatggagcagattcacagcacgtttccatcttgctgccgtgagtatgaaagattgcagcaccacagctgcacgtgttccttccctttctctttttctgcatgcggcccttcgccttcttccttaagataacaaaaaccttattacaaacaggactgaatattatttgaaaataaggcaaacattatataagaaaatgaagctcaacctagatactatcaagtaacgggggtacagtcgcaacgcaattctgctctttgagatttttcaatatgcctgatgggtgataaaatgaaagcaaataaaataataagtctggttttaagaagaaattatcctcttcgatgcaagctatcataaggaacacatcttagttcaaagaagagctttcagtggcatgccaaacaaggcatggaaacagcctttctagtgtaattccctctcttttcttcaaacattgttctccaatgtcatcagactc

SEQ ID NO: 362 - DNA, 4046 bp, Homo sapiens
atccaggcaatctgaatccataatcatgcttctaatcactctctcaatattgccttggagtatgagctgattttgaaattggataaatttactgtattagaaacccagtgctgatgtttaaaatatgagtgaactatgcttatgaattcacttaacattaaaacaacagaaaaattgagggataaaaatggtgttgataaatgagtctggcagcataaccaagtggattcttcaaggtgtccaagcggaaagagaaggaccaaagcccccaccaagctgatgctaaaatgtatggaaaacatctgaaggcaaagacttctatatgatttaattatccatggtgagggcggggaagttaaaaaggaaatgtttttccttatgattatttgaatcctttctctgctttaacctctgaatgtggttccagcctgaatctgattcccgaatcaatggtgtttccccatgggcttctcctcagcattctgcactgagctactcgcttgatccagatgcctccggcccacagttccaccaggcaggtcggtgtccccagcacacagctcctctgctgagtctgctttgtgctttgccattagtttgtgtttcctgttaagtaacattcctacacactggtgccttaggaagtaaaagagttttttgtatttggtcttaaataggtgcaaatccatttcaacaatatcaaaaagcaaacattttcaaataagctataatacacttgtttatataatctgtagaagtggattgaagtttggatgaaaaagcctcctctgccctttagaatgagcaagaaattaaattatttgcttatgaatgatttttttagtacactttctgtctctaaaatgttacattggtgcatattcaggactaataatattacaccaaacattatggttgtatctgccaaggtgtggaaactcatttattcacttttcttcgtcctagtccacttagacattgtcttgcctgtcccatcagaggcagcggtcccacgcagcctgtccttggtcacaatggggacctgtcactgatgctaggaaggactcagtaaactaggtgttaaccaatgacattttgttatcaattaaattaaaattctagaattttactgagaacgatatattgtaaccaaattaatttcttggtgggatatcttttggtacattaaccagaaaaaaattaaaatattagctggatgcagtggctcccgcctgtaatcccagctctttgggaggccatggtgaaaccccatctctactaaaaatacaaaaattagccaggcgtggtggagcactcctgtagtcccagctactcgggaggctgaggcaggagaattgctggaacctgggaggcggaggttgcagtgagccgagatcgcaccaatgcactccagcctggtgacggaggctccatctcaaaaaatatatatattaaaatattaagattattttcatattttttaaataagagaactatcttgactatggattataggataaaaaacacatcctagtgaaaagtatcttaaataagatgcctttacttttgtggcaggataagctggcctaagctgaagtctccaaaaagaaaggaggacagaaaaagaaattggtgaaattttttttgtatgaaaacatacctgtggtgcaaaaataatagatttctcattcaaacactgaaataataagaccatattacttgtttttcagtctcatatttttcagtcccctggtgtgtggattctttctacacaaacaaacagctagtacgtgtcaattatgtaaaattatattaccaacactcaagcaaaaatgttttgggtatattcccctaaaattgtcctttgcaatgggaaatcttttcacattgatatttagaggctggttggagtatttcctcctgaatttgggttttagtggaaggctagacattaatttgagaagctttgttgttctctttatttgctgtcacagcgggagaggacctgctggccccaccgcacgacaccagcacggatctcacggaggtcatggagcagattcacagcacgtttccatcttgctgccgtgagtatgaaagattgcagcaccacagctgcacgtgttccttccctttctctttttctgcatgcggcccttcgccttcttccttaagataacaaaaaccttattacaaacaggactgaatattatttgaaaataaggcaaacattatataagaaaatgaagctcaacctagatactatcaagtaacgggggtacagtcgcaacgcaattctgctctttgagatttttcaatatgcctgatgggtgataaaatgaaagcaaataaaataataagtctggttttaagaagaaattatcctcttcgatgcaagctatcataaggaacacatcttagttcaaagaagagctttcagtggcatgccaaacaaggcatggaaacagcctttctagtgtaattccctctcttttcttcaaacattgttctccaatgtcatcagactccagtgcagaaagggattgttttcagattttccctttttattcccgctggtttcttttctcatggaataaaatagtcattgtataaaggccaaacaatttaagtcatcatagattaggatcctgtgaagtttccatctgaacaaccaagagccagaaaataaccaaattcctggggaaattatataataattcttacttattcattttttccaagtgttttgtcttcagcaccttgccaccttgcaattttggctgagctctcacctaaaacacttctggtgtttctagcagaatatatacatacaagtaaactgtatatatgtatacatatatatacacacacacatacaaatatataaatgcatataaattacttagtactataattatattttaaataatctttgacaggatttgaagacattatttgtaattttagagagatttactctcaaactgattttaaatccagggcagtcactaaaataagaattcatgtaaagcatagcctcttattttacccttgtctgtcatctccttagaaaatgccatcccaggctgggcacggtggctcacacctataatcccagcactttgggagggcgaggcaggtggatcatgagatcaggagttcgagaccagtctgaccaacatggtgaaaccctgtcgctactaaaaatacaaaaagtagccgggcatggtggcatgcacttgtaatcccagcaactcaggaggttgaggcaggagaatcgcttgaacctgggaggtagaggttgcaatgagccgagatcgtgccaccgcactccagcctgggagacagcgtgagacttcctctccaaaaaaaaaaaaaaaaaaaaaaaagccatccgaaatgatgaaaaagagattatcaattatcaggagtgtaggtaaataagatatattgacttcatttaaagattattatttactgtatagaactttgtaatttttaaaataccatcattagcagaatgtgaaaacagctatttaaaatatatttctggcccaggtgcggtggctcatgcctgtaattccagcattttggcaggctgaggcaggtggatcacttgaggtcaggagtttgagaccagcctgattaacatggcaaaaccctatctctactaaaaataccaaaaaaattttccaggtatggtggcacaagcctgtagttgtagtcctacctacttgggaggctgaggcatgagaatcgcttgaacctgggaggctgaagttgcagtgagttgagatcatgccactgcacttcagcctgggcaacagagactctatctcaaaacaacaacaacaacaaaataaatgaataaataaaacatatatttctttgtgaattttcaggaatatttgcctgaagattatattatggtttccaccagcacatgaatatatctatttgtgttttgccagtgtttcccaggttttcatttgtagatctactataatgcttctcaaagtttgcagaatcacatttacactacatca

SEQ ID NO: 363 - DNA, 4044 bp, Homo sapiens
ttcaagaattcaagcacatccatgtatgaaatgatgaaaagtgtattttagaatcctttgaaatctccatgttttaatttttggcttctgaaagttctgctattcatattttttctctggtattatatacaagacagggacagctttccataaaaataaaagctgtattgacttatttataaaattgatacatattttcatattctgcctgtaattattaaaccttttaaaaattgatgcaaaatagaaatcagcgtgggaggtagactcagtgcccagtgcatgtgtctttctctctcttttttttttttttctgagacagagactcactctgttgcccaggctggagttcaatggcacgatctcaggtctgtataacctccacctcccaggctcaagcaattctcatgcctcagcctcccaagtagctgggactacaggcacatgccaccacgcccaactaatttttgtatttttagtagagatcgggtttcaccatgttggccaggctggtctcaaactcctggcctcaagtgacccacccaccctggcctcccaaaccgctgggattacacgcgtgagccaccacacccggccccaatacatgtttctgacttgagtgaatgattacattttctagctgggaaggtttccttgtagcattcctagatagtactcagaacgttttgtaggattcatttgttcttttgtccctttaaagttgctcagccagcaaatattttaataagcctttgtgattcccaaagcttaccaaccacctttggagaatttatctaaacaaatcggattggcaccctcccaatgccaagccaatcccttgagcccctgtaactaatgagaactttaaaaatgcttgtcgccagcatacaatgaattgatcttcatgttaatcttgacttttgatcctttgtggattaaaaattagcatggccccaaatgaatttccactcttggcaatcttggaattaaaatgaaactctgtattcataaatcctaattgtgtgaattgcctattttaacatgaccgttttttaactgtgtctacacattgttgcacataacactttagaactcctttgtctgaattaatatcccagttggtcctgatagcatccttgaattatggccttttaaagtctttttaaaattatttatgttgagtcttagagcagagaagcagacatttccttcacttcctggcaaggagttaaggaaaggggtttaaatgtactgccaattaacaagtgtacttactaaaattcccactgactgcagtaactatttttattttttggtataaattttttttgtccattttttacttatgtccttcaaatgtatgaaatactggcagtaagccaactaatttttgctgatagaccaagaaatgctttcaaaattatttttgacccacaggcatatttttactatgaattgcctatgtttattaagcttgaatggcattcatcaaaaacccaaaacccactgcaatgcagtgatttcctttttaaaatatttttgtgtgatttgttcaggcaaatacccatagccttttatttgataaaaggctgtaaggttaaaagtattggtttagagcaaaatggattagacttctgtctagggtttggctatttgttatatttgttacttgcaagagaagcataactctgtctgttttaaaaagagtgtgtaaacctatggtgtacttaataataattcaactcagctatcccttggacactgtggaggtccactcttttctcctggatgtaacttacagatctgttagaactaggcttcttttagcctgatttctcccccaaataccgggcctcacactttccctccagacgttataggaagggtactcttcatgcctgctctttttttctcacatagctcccagcacacagcacatggtcactgatgtcctttctcccactcagcatagaacagtgagagatggaaggagtgcagcatgctagatgactagggacaacttttatttgaccaagaacagattgttgccattactgggggacagatctcctcttttccccccagcattgagaacgagatgatcatgtagcaaaagaggggacgaaaagcagatgccttagagaagagatggcagtggctgcccttgcaaagcccgccagatcgtcttcactgttatgggctctggaaccaaaaaggaattgagctatctgtgtggaaaggagaattagatgccatattctaacttctccgttgttcctaactgggcccatccaagggactattattatcccaagtgtccagaaggacactgaggattaggccagcactttccttgatgcaagtacttggccaccattttcctgggcgttagggtccagggtgtgtcaagggtgggtcaagagaggcagaaaccaaagacttatgccttcagtggtcccttggtcagaattagtactcagcaaagtaagtagaacatgctctgttctgatacataaaccaaatacacagtatgatttaaataggaaatgagattttttgcaagactaagtgctcagtgaatgctttagtgtatgcactaaatcttaaatcacatgggatatgagaaactaaccaggaaaactagccctcattgaagcattaagccaggaaaaaaaaaatgtgtttcttgtttttcctattagcatccatttaacaactgggctattattaccctatgtagagtgatactttccacgcatttgcatgcctgagagttggaaccaacaaagtaacaggactgccattaagtgatttcttttgttttctctttcagcaaatgttcccagcaggccacaggtaagagttaatggcttggttggctctatgttactgatcccaacctagagtaagcagattatccacgactgattttattcctactttattctccatgtaaataagtaaacttacttgacatttaaatgttagttgattctgtacaacagtttgtcagtctgggagtggggggtggctcccaagccacagataccaaaaataccatgtgtttgatcctttgtgttctaacagctttttaatggcatcttatgtgctacataaagtcactctagatagatttgaccaccactgctctctcaaatgtctacttaaggtggctatcacagaacattgacctaaaaaaaaaatgactggtaccacagaggtggttttgttactttgcaggggaaaatatttcaattttttacttaaaaattttgctgagaactgttggcagctgtacccttatgccttttagtattttctataaaccaaaaagtgtatgagacaggtttactttgccaaggttgaggacacacctgggaaaaagagagataaatttcattaggatttgtagcctgttttgttttgtttttttgttttgttttgttttttgtttttgttttttcccaaaaaggattttgagggcttcacagaaacgaaagagcaggcaggagggggtggaggaacagtcaattatgcatttgtcttatgctcagtaaatctgcgttttatataattaagataaggtatgcctagagtagaagaagcagtcaagtacacatttttctcagggtgggaggagagatgacttctagtcctgcctttgtcctgtaaagataagctgttaattcacattgtcagggtgaaattcaacaaaactctgttttagggtaaagatttggggacccttagaaatttccttgtgagcaatttgtgagggaggtcactggccttctatctttgcaagtagctgcttaggaaggtagtttttgtgtgactcagttcccacttttaatttttccctttagcatagtgagttagggatcctgagattttgttttccattcacattttcttatcacatacttttagtaataatgtgccacaaagccacagcagctttggagaacattttctttcatgaacttgtttactaatctttttgaaacaatgagccttctgaatgattgtcttattggcaagaga

SEQ ID NO: 364 - DNA, 4038 bp, Homo sapiens
gctattcatattttttctctggtattatatacaagacagggacagctttccataaaaataaaagctgtattgacttatttataaaattgatacatattttcatattctgcctgtaattattaaaccttttaaaaattgatgcaaaatagaaatcagcgtgggaggtagactcagtgcccagtgcatgtgtctttctctctcttttttttttttttctgagacagagactcactctgttgcccaggctggagttcaatggcacgatctcaggtctgtataacctccacctcccaggctcaagcaattctcatgcctcagcctcccaagtagctgggactacaggcacatgccaccacgcccaactaatttttgtatttttagtagagatcgggtttcaccatgttggccaggctggtctcaaactcctggcctcaagtgacccacccaccctggcctcccaaaccgctgggattacacgcgtgagccaccacacccggccccaatacatgtttctgacttgagtgaatgattacattttctagctgggaaggtttccttgtagcattcctagatagtactcagaacgttttgtaggattcatttgttcttttgtccctttaaagttgctcagccagcaaatattttaataagcctttgtgattcccaaagcttaccaaccacctttggagaatttatctaaacaaatcggattggcaccctcccaatgccaagccaatcccttgagcccctgtaactaatgagaactttaaaaatgcttgtcgccagcatacaatgaattgatcttcatgttaatcttgacttttgatcctttgtggattaaaaattagcatggccccaaatgaatttccactcttggcaatcttggaattaaaatgaaactctgtattcataaatcctaattgtgtgaattgcctattttaacatgaccgttttttaactgtgtctacacattgttgcacataacactttagaactcctttgtctgaattaatatcccagttggtcctgatagcatccttgaattatggccttttaaagtctttttaaaattatttatgttgagtcttagagcagagaagcagacatttccttcacttcctggcaaggagttaaggaaaggggtttaaatgtactgccaattaacaagtgtacttactaaaattcccactgactgcagtaactatttttattttttggtataaattttttttgtccattttttacttatgtccttcaaatgtatgaaatactggcagtaagccaactaatttttgctgatagaccaagaaatgctttcaaaattatttttgacccacaggcatatttttactatgaattgcctatgtttattaagcttgaatggcattcatcaaaaacccaaaacccactgcaatgcagtgatttcctttttaaaatatttttgtgtgatttgttcaggcaaatacccatagccttttatttgataaaaggctgtaaggttaaaagtattggtttagagcaaaatggattagacttctgtctagggtttggctatttgttatatttgttacttgcaagagaagcataactctgtctgttttaaaaagagtgtgtaaacctatggtgtacttaataataattcaactcagctatcccttggacactgtggaggtccactcttttctcctggatgtaacttacagatctgttagaactaggcttcttttagcctgatttctcccccaaataccgggcctcacactttccctccagacgttataggaagggtactcttcatgcctgctctttttttctcacatagctcccagcacacagcacatggtcactgatgtcctttctcccactcagcatagaacagtgagagatggaaggagtgcagcatgctagatgactagggacaacttttatttgaccaagaacagattgttgccattactgggggacagatctcctcttttccccccagcattgagaacgagatgatcatgtagcaaaagaggggacgaaaagcagatgccttagagaagagatggcagtggctgcccttgcaaagcccgccagatcgtcttcactgttatgggctctggaaccaaaaaggaattgagctatctgtgtggaaaggagaattagatgccatattctaacttctccgttgttcctaactgggcccatccaagggactattattatcccaagtgtccagaaggacactgaggattaggccagcactttccttgatgcaagtacttggccaccattttcctgggcgttagggtccagggtgtgtcaagggtgggtcaagagaggcagaaaccaaagacttatgccttcagtggtcccttggtcagaattagtactcagcaaagtaagtagaacatgctctgttctgatacataaaccaaatacacagtatgatttaaataggaaatgagattttttgcaagactaagtgctcagtgaatgctttagtgtatgcactaaatcttaaatcacatgggatatgagaaactaaccaggaaaactagccctcattgaagcattaagccaggaaaaaaaaaatgtgtttcttgtttttcctattagcatccatttaacaactgggctattattaccctatgtagagtgatactttccacgcatttgcatgcctgagagttggaaccaacaaagtaacaggactgccattaagtgatttcttttgttttctctttcagcaaatgttcccagcaggccacaggtaagagttaatggcttggttggctctatgttactgatcccaacctagagtaagcagattatccacgactgattttattcctactttattctccatgtaaataagtaaacttacttgacatttaaatgttagttgattctgtacaacagtttgtcagtctgggagtggggggtggctcccaagccacagataccaaaaataccatgtgtttgatcctttgtgttctaacagctttttaatggcatcttatgtgctacataaagtcactctagatagatttgaccaccactgctctctcaaatgtctacttaaggtggctatcacagaacattgacctaaaaaaaaaatgactggtaccacagaggtggttttgttactttgcaggggaaaatatttcaattttttacttaaaaattttgctgagaactgttggcagctgtacccttatgccttttagtattttctataaaccaaaaagtgtatgagacaggtttactttgccaaggttgaggacacacctgggaaaaagagagataaatttcattaggatttgtagcctgttttgttttgtttttttgttttgttttgttttttgtttttgttttttcccaaaaaggattttgagggcttcacagaaacgaaagagcaggcaggagggggtggaggaacagtcaattatgcatttgtcttatgctcagtaaatctgcgttttatataattaagataaggtatgcctagagtagaagaagcagtcaagtacacatttttctcagggtgggaggagagatgacttctagtcctgcctttgtcctgtaaagataagctgttaattcacattgtcagggtgaaattcaacaaaactctgttttagggtaaagatttggggacccttagaaatttccttgtgagcaatttgtgagggaggtcactggccttctatctttgcaagtagctgcttaggaaggtagtttttgtgtgactcagttcccacttttaatttttccctttagcatagtgagttagggatcctgagattttgttttccattcacattttcttatcacatacttttagtaataatgtgccacaaagccacagcagctttggagaacattttctttcatgaacttgtttactaatctttttgaaacaatgagccttctgaatgattgtcttattggcaagagaggctgggatcttaactaaaagacaagggtatgtgaagtaggctaggggtgtggtgagctgtgggtgttctctcctgcttgcttctgttgtct

SEQ ID NO: 365 - DNA, 4052 bp, Homo sapiens
tagagcagagaagcagacatttccttcacttcctggcaaggagttaaggaaaggggtttaaatgtactgccaattaacaagtgtacttactaaaattcccactgactgcagtaactatttttattttttggtataaattttttttgtccattttttacttatgtccttcaaatgtatgaaatactggcagtaagccaactaatttttgctgatagaccaagaaatgctttcaaaattatttttgacccacaggcatatttttactatgaattgcctatgtttattaagcttgaatggcattcatcaaaaacccaaaacccactgcaatgcagtgatttcctttttaaaatatttttgtgtgatttgttcaggcaaatacccatagccttttatttgataaaaggctgtaaggttaaaagtattggtttagagcaaaatggattagacttctgtctagggtttggctatttgttatatttgttacttgcaagagaagcataactctgtctgttttaaaaagagtgtgtaaacctatggtgtacttaataataattcaactcagctatcccttggacactgtggaggtccactcttttctcctggatgtaacttacagatctgttagaactaggcttcttttagcctgatttctcccccaaataccgggcctcacactttccctccagacgttataggaagggtactcttcatgcctgctctttttttctcacatagctcccagcacacagcacatggtcactgatgtcctttctcccactcagcatagaacagtgagagatggaaggagtgcagcatgctagatgactagggacaacttttatttgaccaagaacagattgttgccattactgggggacagatctcctcttttccccccagcattgagaacgagatgatcatgtagcaaaagaggggacgaaaagcagatgccttagagaagagatggcagtggctgcccttgcaaagcccgccagatcgtcttcactgttatgggctctggaaccaaaaaggaattgagctatctgtgtggaaaggagaattagatgccatattctaacttctccgttgttcctaactgggcccatccaagggactattattatcccaagtgtccagaaggacactgaggattaggccagcactttccttgatgcaagtacttggccaccattttcctgggcgttagggtccagggtgtgtcaagggtgggtcaagagaggcagaaaccaaagacttatgccttcagtggtcccttggtcagaattagtactcagcaaagtaagtagaacatgctctgttctgatacataaaccaaatacacagtatgatttaaataggaaatgagattttttgcaagactaagtgctcagtgaatgctttagtgtatgcactaaatcttaaatcacatgggatatgagaaactaaccaggaaaactagccctcattgaagcattaagccaggaaaaaaaaaatgtgtttcttgtttttcctattagcatccatttaacaactgggctattattaccctatgtagagtgatactttccacgcatttgcatgcctgagagttggaaccaacaaagtaacaggactgccattaagtgatttcttttgttttctctttcagcaaatgttcccagcaggccacaggtaagagttaatggcttggttggctctatgttactgatcccaacctagagtaagcagattatccacgactgattttattcctactttattctccatgtaaataagtaaacttacttgacatttaaatgttagttgattctgtacaacagtttgtcagtctgggagtggggggtggctcccaagccacagataccaaaaataccatgtgtttgatcctttgtgttctaacagctttttaatggcatcttatgtgctacataaagtcactctagatagatttgaccaccactgctctctcaaatgtctacttaaggtggctatcacagaacattgacctaaaaaaaaaatgactggtaccacagaggtggttttgttactttgcaggggaaaatatttcaattttttacttaaaaattttgctgagaactgttggcagctgtacccttatgccttttagtattttctataaaccaaaaagtgtatgagacaggtttactttgccaaggttgaggacacacctgggaaaaagagagataaatttcattaggatttgtagcctgttttgttttgtttttttgttttgttttgttttttgtttttgttttttcccaaaaaggattttgagggcttcacagaaacgaaagagcaggcaggagggggtggaggaacagtcaattatgcatttgtcttatgctcagtaaatctgcgttttatataattaagataaggtatgcctagagtagaagaagcagtcaagtacacatttttctcagggtgggaggagagatgacttctagtcctgcctttgtcctgtaaagataagctgttaattcacattgtcagggtgaaattcaacaaaactctgttttagggtaaagatttggggacccttagaaatttccttgtgagcaatttgtgagggaggtcactggccttctatctttgcaagtagctgcttaggaaggtagtttttgtgtgactcagttcccacttttaatttttccctttagcatagtgagttagggatcctgagattttgttttccattcacattttcttatcacatacttttagtaataatgtgccacaaagccacagcagctttggagaacattttctttcatgaacttgtttactaatctttttgaaacaatgagccttctgaatgattgtcttattggcaagagaggctgggatcttaactaaaagacaagggtatgtgaagtaggctaggggtgtggtgagctgtgggtgttctctcctgcttgcttctgttgtctaagtgaattggaagccgggactttagcagggagtgaggttggggaggaggtgtcagaagtgcgaggagagactggaggatgtgtgatagcttcttggagaatagaagagcagatggcctgggaaatagagtgtgactataagcagcattaaaggtgccactcatgaatttaacatgaggccattctgcagggttgtaagttgccctctaggcatattcacgttcatgagcacaggcaccagaatgggctgagtattggcatttaaaaagttgaagttggggtttgacaaagtgagtacagtgattcaagggaagaggcaaagaagtgattataatgattgaaccagatgcttaagctcagtagtgaaaggaatgaggaaatgtccagtgtgggagacagaaataaagatgggaggatcaatggatcctattgtcaaaggatggataaatttgcagttgtaggggaagtaagctgtggaggtagaggtggttgtcagaagctaggttgaatgatactgaaattagaggggttgcaagtattggtaatggtccatatttggacctttgtgtgaatggctaagaaggttggaggacaggaccattggaggaaaagagcctaaagaaccaagaagccagagtgctggaagaatcatctccatgggtgttgaaatcactaacatttaaaaatggctttagagtaggggactttgagccattttttacttcaagaagtgaaggaacatgacctacggagtcagtagatgactgcataatggagtcatatagtctgatgatatgagattcaaagctgggtgtttttagggagaggagaaagaagataccccagaggccccaatgaggaccaaggaagactcatgcagtgtatgaggaatgggggagaatggggaggggaagtgctgtgtgagagggttatgagggaagctgtgtcttcaggtagatgcagatattgattagagcaagtagatgcaggcagcattcagagaagggtttgggaacatgggttttgcggatcacaggccacatgacctataggacaggtttcaagagctaggaagagtgaggcatagggtcacaaaaaggg

SEQ ID NO: 366 - DNA, 4052 bp, Homo sapiens
gcacacagcacatggtcactgatgtcctttctcccactcagcatagaacagtgagagatggaaggagtgcagcatgctagatgactagggacaacttttatttgaccaagaacagattgttgccattactgggggacagatctcctcttttccccccagcattgagaacgagatgatcatgtagcaaaagaggggacgaaaagcagatgccttagagaagagatggcagtggctgcccttgcaaagcccgccagatcgtcttcactgttatgggctctggaaccaaaaaggaattgagctatctgtgtggaaaggagaattagatgccatattctaacttctccgttgttcctaactgggcccatccaagggactattattatcccaagtgtccagaaggacactgaggattaggccagcactttccttgatgcaagtacttggccaccattttcctgggcgttagggtccagggtgtgtcaagggtgggtcaagagaggcagaaaccaaagacttatgccttcagtggtcccttggtcagaattagtactcagcaaagtaagtagaacatgctctgttctgatacataaaccaaatacacagtatgatttaaataggaaatgagattttttgcaagactaagtgctcagtgaatgctttagtgtatgcactaaatcttaaatcacatgggatatgagaaactaaccaggaaaactagccctcattgaagcattaagccaggaaaaaaaaaatgtgtttcttgtttttcctattagcatccatttaacaactgggctattattaccctatgtagagtgatactttccacgcatttgcatgcctgagagttggaaccaacaaagtaacaggactgccattaagtgatttcttttgttttctctttcagcaaatgttcccagcaggccacaggtaagagttaatggcttggttggctctatgttactgatcccaacctagagtaagcagattatccacgactgattttattcctactttattctccatgtaaataagtaaacttacttgacatttaaatgttagttgattctgtacaacagtttgtcagtctgggagtggggggtggctcccaagccacagataccaaaaataccatgtgtttgatcctttgtgttctaacagctttttaatggcatcttatgtgctacataaagtcactctagatagatttgaccaccactgctctctcaaatgtctacttaaggtggctatcacagaacattgacctaaaaaaaaaatgactggtaccacagaggtggttttgttactttgcaggggaaaatatttcaattttttacttaaaaattttgctgagaactgttggcagctgtacccttatgccttttagtattttctataaaccaaaaagtgtatgagacaggtttactttgccaaggttgaggacacacctgggaaaaagagagataaatttcattaggatttgtagcctgttttgttttgtttttttgttttgttttgttttttgtttttgttttttcccaaaaaggattttgagggcttcacagaaacgaaagagcaggcaggagggggtggaggaacagtcaattatgcatttgtcttatgctcagtaaatctgcgttttatataattaagataaggtatgcctagagtagaagaagcagtcaagtacacatttttctcagggtgggaggagagatgacttctagtcctgcctttgtcctgtaaagataagctgttaattcacattgtcagggtgaaattcaacaaaactctgttttagggtaaagatttggggacccttagaaatttccttgtgagcaatttgtgagggaggtcactggccttctatctttgcaagtagctgcttaggaaggtagtttttgtgtgactcagttcccacttttaatttttccctttagcatagtgagttagggatcctgagattttgttttccattcacattttcttatcacatacttttagtaataatgtgccacaaagccacagcagctttggagaacattttctttcatgaacttgtttactaatctttttgaaacaatgagccttctgaatgattgtcttattggcaagagaggctgggatcttaactaaaagacaagggtatgtgaagtaggctaggggtgtggtgagctgtgggtgttctctcctgcttgcttctgttgtctaagtgaattggaagccgggactttagcagggagtgaggttggggaggaggtgtcagaagtgcgaggagagactggaggatgtgtgatagcttcttggagaatagaagagcagatggcctgggaaatagagtgtgactataagcagcattaaaggtgccactcatgaatttaacatgaggccattctgcagggttgtaagttgccctctaggcatattcacgttcatgagcacaggcaccagaatgggctgagtattggcatttaaaaagttgaagttggggtttgacaaagtgagtacagtgattcaagggaagaggcaaagaagtgattataatgattgaaccagatgcttaagctcagtagtgaaaggaatgaggaaatgtccagtgtgggagacagaaataaagatgggaggatcaatggatcctattgtcaaaggatggataaatttgcagttgtaggggaagtaagctgtggaggtagaggtggttgtcagaagctaggttgaatgatactgaaattagaggggttgcaagtattggtaatggtccatatttggacctttgtgtgaatggctaagaaggttggaggacaggaccattggaggaaaagagcctaaagaaccaagaagccagagtgctggaagaatcatctccatgggtgttgaaatcactaacatttaaaaatggctttagagtaggggactttgagccattttttacttcaagaagtgaaggaacatgacctacggagtcagtagatgactgcataatggagtcatatagtctgatgatatgagattcaaagctgggtgtttttagggagaggagaaagaagataccccagaggccccaatgaggaccaaggaagactcatgcagtgtatgaggaatgggggagaatggggaggggaagtgctgtgtgagagggttatgagggaagctgtgtcttcaggtagatgcagatattgattagagcaagtagatgcaggcagcattcagagaagggtttgggaacatgggttttgcggatcacaggccacatgacctataggacaggtttcaagagctaggaagagtgaggcatagggtcacaaaaaggggtatgcagatctctatatgactagaatacaggtgatggaagggcaaccaggagtctagagctttttagggtggcccattaaaattagggataaagggtacaaagaggttagtcctgatggtccccaggtggaatgaggctgtgagtgacaaaggcaaggagggaagagagaatcttttaaaatcctcagatataatacaagtgctcagaatttaaagcagaaaattatctgaggaggccttctcctcctactctgtttctagattttagaaattgagtttacaaagagctaaatggttcccagttgtacagcaacttagtggatggagcaaacatgtaactcaatacaagaggcccctttcccattttcttccttccctttccatgtgttttttcctgctcttctcttttcttcattttttcatgtcttgggtcgaatggaaattcatgaaaagtatatattttcacctggagggttgggctaatatttacatagcatgatcttaaatttttagaattctgacacctaaaatgagcagtattgtgtgtccaattaatagacacatctcattctcaaggataatggagtatataggcacaattcaaaaatcctcttggctttatatttaacatgaatcagcgccagagtttcagttatcaatattaatatgtaacaaaatgttcctttctcatatggggttaatctctccccttctctgtcctcaaaccacttctttgaatt

SEQ ID NO: 367 - DNA, 4046 bp, Homo sapiens
cattactgggggacagatctcctcttttccccccagcattgagaacgagatgatcatgtagcaaaagaggggacgaaaagcagatgccttagagaagagatggcagtggctgcccttgcaaagcccgccagatcgtcttcactgttatgggctctggaaccaaaaaggaattgagctatctgtgtggaaaggagaattagatgccatattctaacttctccgttgttcctaactgggcccatccaagggactattattatcccaagtgtccagaaggacactgaggattaggccagcactttccttgatgcaagtacttggccaccattttcctgggcgttagggtccagggtgtgtcaagggtgggtcaagagaggcagaaaccaaagacttatgccttcagtggtcccttggtcagaattagtactcagcaaagtaagtagaacatgctctgttctgatacataaaccaaatacacagtatgatttaaataggaaatgagattttttgcaagactaagtgctcagtgaatgctttagtgtatgcactaaatcttaaatcacatgggatatgagaaactaaccaggaaaactagccctcattgaagcattaagccaggaaaaaaaaaatgtgtttcttgtttttcctattagcatccatttaacaactgggctattattaccctatgtagagtgatactttccacgcatttgcatgcctgagagttggaaccaacaaagtaacaggactgccattaagtgatttcttttgttttctctttcagcaaatgttcccagcaggccacaggtaagagttaatggcttggttggctctatgttactgatcccaacctagagtaagcagattatccacgactgattttattcctactttattctccatgtaaataagtaaacttacttgacatttaaatgttagttgattctgtacaacagtttgtcagtctgggagtggggggtggctcccaagccacagataccaaaaataccatgtgtttgatcctttgtgttctaacagctttttaatggcatcttatgtgctacataaagtcactctagatagatttgaccaccactgctctctcaaatgtctacttaaggtggctatcacagaacattgacctaaaaaaaaaatgactggtaccacagaggtggttttgttactttgcaggggaaaatatttcaattttttacttaaaaattttgctgagaactgttggcagctgtacccttatgccttttagtattttctataaaccaaaaagtgtatgagacaggtttactttgccaaggttgaggacacacctgggaaaaagagagataaatttcattaggatttgtagcctgttttgttttgtttttttgttttgttttgttttttgtttttgttttttcccaaaaaggattttgagggcttcacagaaacgaaagagcaggcaggagggggtggaggaacagtcaattatgcatttgtcttatgctcagtaaatctgcgttttatataattaagataaggtatgcctagagtagaagaagcagtcaagtacacatttttctcagggtgggaggagagatgacttctagtcctgcctttgtcctgtaaagataagctgttaattcacattgtcagggtgaaattcaacaaaactctgttttagggtaaagatttggggacccttagaaatttccttgtgagcaatttgtgagggaggtcactggccttctatctttgcaagtagctgcttaggaaggtagtttttgtgtgactcagttcccacttttaatttttccctttagcatagtgagttagggatcctgagattttgttttccattcacattttcttatcacatacttttagtaataatgtgccacaaagccacagcagctttggagaacattttctttcatgaacttgtttactaatctttttgaaacaatgagccttctgaatgattgtcttattggcaagagaggctgggatcttaactaaaagacaagggtatgtgaagtaggctaggggtgtggtgagctgtgggtgttctctcctgcttgcttctgttgtctaagtgaattggaagccgggactttagcagggagtgaggttggggaggaggtgtcagaagtgcgaggagagactggaggatgtgtgatagcttcttggagaatagaagagcagatggcctgggaaatagagtgtgactataagcagcattaaaggtgccactcatgaatttaacatgaggccattctgcagggttgtaagttgccctctaggcatattcacgttcatgagcacaggcaccagaatgggctgagtattggcatttaaaaagttgaagttggggtttgacaaagtgagtacagtgattcaagggaagaggcaaagaagtgattataatgattgaaccagatgcttaagctcagtagtgaaaggaatgaggaaatgtccagtgtgggagacagaaataaagatgggaggatcaatggatcctattgtcaaaggatggataaatttgcagttgtaggggaagtaagctgtggaggtagaggtggttgtcagaagctaggttgaatgatactgaaattagaggggttgcaagtattggtaatggtccatatttggacctttgtgtgaatggctaagaaggttggaggacaggaccattggaggaaaagagcctaaagaaccaagaagccagagtgctggaagaatcatctccatgggtgttgaaatcactaacatttaaaaatggctttagagtaggggactttgagccattttttacttcaagaagtgaaggaacatgacctacggagtcagtagatgactgcataatggagtcatatagtctgatgatatgagattcaaagctgggtgtttttagggagaggagaaagaagataccccagaggccccaatgaggaccaaggaagactcatgcagtgtatgaggaatgggggagaatggggaggggaagtgctgtgtgagagggttatgagggaagctgtgtcttcaggtagatgcagatattgattagagcaagtagatgcaggcagcattcagagaagggtttgggaacatgggttttgcggatcacaggccacatgacctataggacaggtttcaagagctaggaagagtgaggcatagggtcacaaaaaggggtatgcagatctctatatgactagaatacaggtgatggaagggcaaccaggagtctagagctttttagggtggcccattaaaattagggataaagggtacaaagaggttagtcctgatggtccccaggtggaatgaggctgtgagtgacaaaggcaaggagggaagagagaatcttttaaaatcctcagatataatacaagtgctcagaatttaaagcagaaaattatctgaggaggccttctcctcctactctgtttctagattttagaaattgagtttacaaagagctaaatggttcccagttgtacagcaacttagtggatggagcaaacatgtaactcaatacaagaggcccctttcccattttcttccttccctttccatgtgttttttcctgctcttctcttttcttcattttttcatgtcttgggtcgaatggaaattcatgaaaagtatatattttcacctggagggttgggctaatatttacatagcatgatcttaaatttttagaattctgacacctaaaatgagcagtattgtgtgtccaattaatagacacatctcattctcaaggataatggagtatataggcacaattcaaaaatcctcttggctttatatttaacatgaatcagcgccagagtttcagttatcaatattaatatgtaacaaaatgttcctttctcatatggggttaatctctccccttctctgtcctcaaaccacttctttgaatttactgtggccggcacttacctcatattacaattgaatgaggctgcctggctgagatatcttccacacctgcttcacaggagggcctcccctcagtacaatgcctggaacccatcagt

SEQ ID NO: 368 - DNA, 4045 bp, Homo sapiens
cttgcaaagcccgccagatcgtcttcactgttatgggctctggaaccaaaaaggaattgagctatctgtgtggaaaggagaattagatgccatattctaacttctccgttgttcctaactgggcccatccaagggactattattatcccaagtgtccagaaggacactgaggattaggccagcactttccttgatgcaagtacttggccaccattttcctgggcgttagggtccagggtgtgtcaagggtgggtcaagagaggcagaaaccaaagacttatgccttcagtggtcccttggtcagaattagtactcagcaaagtaagtagaacatgctctgttctgatacataaaccaaatacacagtatgatttaaataggaaatgagattttttgcaagactaagtgctcagtgaatgctttagtgtatgcactaaatcttaaatcacatgggatatgagaaactaaccaggaaaactagccctcattgaagcattaagccaggaaaaaaaaaatgtgtttcttgtttttcctattagcatccatttaacaactgggctattattaccctatgtagagtgatactttccacgcatttgcatgcctgagagttggaaccaacaaagtaacaggactgccattaagtgatttcttttgttttctctttcagcaaatgttcccagcaggccacaggtaagagttaatggcttggttggctctatgttactgatcccaacctagagtaagcagattatccacgactgattttattcctactttattctccatgtaaataagtaaacttacttgacatttaaatgttagttgattctgtacaacagtttgtcagtctgggagtggggggtggctcccaagccacagataccaaaaataccatgtgtttgatcctttgtgttctaacagctttttaatggcatcttatgtgctacataaagtcactctagatagatttgaccaccactgctctctcaaatgtctacttaaggtggctatcacagaacattgacctaaaaaaaaaatgactggtaccacagaggtggttttgttactttgcaggggaaaatatttcaattttttacttaaaaattttgctgagaactgttggcagctgtacccttatgccttttagtattttctataaaccaaaaagtgtatgagacaggtttactttgccaaggttgaggacacacctgggaaaaagagagataaatttcattaggatttgtagcctgttttgttttgtttttttgttttgttttgttttttgtttttgttttttcccaaaaaggattttgagggcttcacagaaacgaaagagcaggcaggagggggtggaggaacagtcaattatgcatttgtcttatgctcagtaaatctgcgttttatataattaagataaggtatgcctagagtagaagaagcagtcaagtacacatttttctcagggtgggaggagagatgacttctagtcctgcctttgtcctgtaaagataagctgttaattcacattgtcagggtgaaattcaacaaaactctgttttagggtaaagatttggggacccttagaaatttccttgtgagcaatttgtgagggaggtcactggccttctatctttgcaagtagctgcttaggaaggtagtttttgtgtgactcagttcccacttttaatttttccctttagcatagtgagttagggatcctgagattttgttttccattcacattttcttatcacatacttttagtaataatgtgccacaaagccacagcagctttggagaacattttctttcatgaacttgtttactaatctttttgaaacaatgagccttctgaatgattgtcttattggcaagagaggctgggatcttaactaaaagacaagggtatgtgaagtaggctaggggtgtggtgagctgtgggtgttctctcctgcttgcttctgttgtctaagtgaattggaagccgggactttagcagggagtgaggttggggaggaggtgtcagaagtgcgaggagagactggaggatgtgtgatagcttcttggagaatagaagagcagatggcctgggaaatagagtgtgactataagcagcattaaaggtgccactcatgaatttaacatgaggccattctgcagggttgtaagttgccctctaggcatattcacgttcatgagcacaggcaccagaatgggctgagtattggcatttaaaaagttgaagttggggtttgacaaagtgagtacagtgattcaagggaagaggcaaagaagtgattataatgattgaaccagatgcttaagctcagtagtgaaaggaatgaggaaatgtccagtgtgggagacagaaataaagatgggaggatcaatggatcctattgtcaaaggatggataaatttgcagttgtaggggaagtaagctgtggaggtagaggtggttgtcagaagctaggttgaatgatactgaaattagaggggttgcaagtattggtaatggtccatatttggacctttgtgtgaatggctaagaaggttggaggacaggaccattggaggaaaagagcctaaagaaccaagaagccagagtgctggaagaatcatctccatgggtgttgaaatcactaacatttaaaaatggctttagagtaggggactttgagccattttttacttcaagaagtgaaggaacatgacctacggagtcagtagatgactgcataatggagtcatatagtctgatgatatgagattcaaagctgggtgtttttagggagaggagaaagaagataccccagaggccccaatgaggaccaaggaagactcatgcagtgtatgaggaatgggggagaatggggaggggaagtgctgtgtgagagggttatgagggaagctgtgtcttcaggtagatgcagatattgattagagcaagtagatgcaggcagcattcagagaagggtttgggaacatgggttttgcggatcacaggccacatgacctataggacaggtttcaagagctaggaagagtgaggcatagggtcacaaaaaggggtatgcagatctctatatgactagaatacaggtgatggaagggcaaccaggagtctagagctttttagggtggcccattaaaattagggataaagggtacaaagaggttagtcctgatggtccccaggtggaatgaggctgtgagtgacaaaggcaaggagggaagagagaatcttttaaaatcctcagatataatacaagtgctcagaatttaaagcagaaaattatctgaggaggccttctcctcctactctgtttctagattttagaaattgagtttacaaagagctaaatggttcccagttgtacagcaacttagtggatggagcaaacatgtaactcaatacaagaggcccctttcccattttcttccttccctttccatgtgttttttcctgctcttctcttttcttcattttttcatgtcttgggtcgaatggaaattcatgaaaagtatatattttcacctggagggttgggctaatatttacatagcatgatcttaaatttttagaattctgacacctaaaatgagcagtattgtgtgtccaattaatagacacatctcattctcaaggataatggagtatataggcacaattcaaaaatcctcttggctttatatttaacatgaatcagcgccagagtttcagttatcaatattaatatgtaacaaaatgttcctttctcatatggggttaatctctccccttctctgtcctcaaaccacttctttgaatttactgtggccggcacttacctcatattacaattgaatgaggctgcctggctgagatatcttccacacctgcttcacaggagggcctcccctcagtacaatgcctggaacccatcagtgtttgctgaatttttgctccctctaacatggcaatcaaatgttcaaaatggagaagcaagtgtctgaagaatccaaatttgaatagtcatggagaatgggctctaggccagag

SEQ ID NO: 369 - DNA, 4049 bp, Homo sapiens
atggctaagaaggttggaggacaggaccattggaggaaaagagcctaaagaaccaagaagccagagtgctggaagaatcatctccatgggtgttgaaatcactaacatttaaaaatggctttagagtaggggactttgagccattttttacttcaagaagtgaaggaacatgacctacggagtcagtagatgactgcataatggagtcatatagtctgatgatatgagattcaaagctgggtgtttttagggagaggagaaagaagataccccagaggccccaatgaggaccaaggaagactcatgcagtgtatgaggaatgggggagaatggggaggggaagtgctgtgtgagagggttatgagggaagctgtgtcttcaggtagatgcagatattgattagagcaagtagatgcaggcagcattcagagaagggtttgggaacatgggttttgcggatcacaggccacatgacctataggacaggtttcaagagctaggaagagtgaggcatagggtcacaaaaaggggtatgcagatctctatatgactagaatacaggtgatggaagggcaaccaggagtctagagctttttagggtggcccattaaaattagggataaagggtacaaagaggttagtcctgatggtccccaggtggaatgaggctgtgagtgacaaaggcaaggagggaagagagaatcttttaaaatcctcagatataatacaagtgctcagaatttaaagcagaaaattatctgaggaggccttctcctcctactctgtttctagattttagaaattgagtttacaaagagctaaatggttcccagttgtacagcaacttagtggatggagcaaacatgtaactcaatacaagaggcccctttcccattttcttccttccctttccatgtgttttttcctgctcttctcttttcttcattttttcatgtcttgggtcgaatggaaattcatgaaaagtatatattttcacctggagggttgggctaatatttacatagcatgatcttaaatttttagaattctgacacctaaaatgagcagtattgtgtgtccaattaatagacacatctcattctcaaggataatggagtatataggcacaattcaaaaatcctcttggctttatatttaacatgaatcagcgccagagtttcagttatcaatattaatatgtaacaaaatgttcctttctcatatggggttaatctctccccttctctgtcctcaaaccacttctttgaatttactgtggccggcacttacctcatattacaattgaatgaggctgcctggctgagatatcttccacacctgcttcacaggagggcctcccctcagtacaatgcctggaacccatcagtgtttgctgaatttttgctccctctaacatggcaatcaaatgttcaaaatggagaagcaagtgtctgaagaatccaaatttgaatagtcatggagaatgggctctaggccagagtcaaatgagtttgctgctttcagcatacctgggaaaaggaggggctccgtgggcagtttttccagtggcttcattaggaacatgcttccagggagcaggataaagtcccccataaaataaggtgtaaagacagatggaatatctttcctgagggtccagaaaggccttttatgatttatgaggcatggaccagtttggatgatttcattttagcactttttttttatttttttctaatttcaaaatccttttagaagaccaaatgtttgaccttcccttcaaaaggttgataccacttccatgagtgtggcctggatttatattgtctctgacctgggacatttaactttaactggcaccactaaacacccttgggttatgattcctgccttgccttcctcttctctggactccagcttgggatcaagatggttggcattgttagggtaccccctctacagatgacctcccacagtcccccaggaagacatgggatattttcaccagcctcattcgctcaccattggtaccttcagcagaaagaaatgaagtcctctccattttaactttgcttccagcctggccaagagaaaagactttcagacttccctctaaatcagctgcagtgatagaaagcagactaggtaacttcagcatgagagggagggacctcattgcaggaagcaaaagtcacagtagagttaagactcttgaaagaagcacttttattttcttgaagaattgacagatctctgcttcctgtaatgttttgtgcaaatttctgacagtgctattttcccttcccataggcaatgtgaagtattcatccggccaaccaatgtttcctgacgtacagtgttgcccttttcagcaaatgccaattccaagttccattaaatcagaagctccatggctccttggcccacgatgttgagtgctgactgtgtgttctactgaaagagtaaaacactgactatccaaagagaaatggatattttgtttttataataaccatatattattgttttcttcttccctttctatgcaagtgtaaattaatgaacagagaggtatttggaaatggtaatacatttgtcacggatttgtataatgtatacagcattgggaaagtgggtgggggctttctaatatgataccgtctttttaataactatgacaaagcttacataagaattagaagaccactttacatttttacattccttctgctgttcatattaaccttgcacaattacttcattttttctttgactcttttaccacaatgttttggttatttataatttatcagccatatgtttatcagccatataaccaactagatcccaaatagatccatgtatttgtttccgtgatttggccacattaataaattcataaatttcaatcaaatatcttatatatacacacatatggtttaagctacagccctgtgtatgccgtttaactttatttgacgttgcccacttacttctttgctgaccacttggataaccgtaataaaaatcctataagcctaaatggcatttcttttgggatatttttcctgcattttattccctttttatataagtaggaattaattatttattttatgtcttaatctatttgataaagaagactacattataataatctcaaagatcatattaccaaaggttgcccacttgagcatattttcattttgacacagaaacaaaatttagtacaacctttcctagttcccatgtcttgattttcatcattacatgcacagcagacctttacctattgtgataccagaacacatcattgtctttggttcccttcaaagagaattttattgttgttttgtattttcaagtccttaatagttcttgaaactcctagttgttttcttgttgaaagcagacacacatttagtgcacggcttattttacctttcgggtgaaagatcagatgtttttatacccttcacttgatcaatatatttggaaagaatgtttatcaaaagtctatgtcactgcttctacagaagaatgaaattaatgcttaggtgatggtacctccacctacatctttttgagtgcattcaattatgtattttggtttagcttctgatttaacatttaattgattcagtttaaacatgttacttaattagcaaatgtagaggaaccaaaaaaaggtgaaaataatatgttttgattcaaacctaaagacataaaaacataaagacattttaactttgggttctctttagctgggatctggccagaaggaggcttaaagttagaaattgctattattttagaataggttgggtgggttggggggcaagggtgtctatttgcagcagagatattttgaaaagaagaaaattgttttatataaaaaggaaagccatgaccacctttctacctcagatccatcttcatccattgcattggaaactgctttatgctgctgcagtctgcaaagtctagagcttttatcaggccatgtcatacccaagaaagcacctatttaaagaaaaaacaattccctg

SEQ ID NO: 370 - DNA, 4087 bp, Homo sapiens
tttatattgtctctgacctgggacatttaactttaactggcaccactaaacacccttgggttatgattcctgccttgccttcctcttctctggactccagcttgggatcaagatggttggcattgttagggtaccccctctacagatgacctcccacagtcccccaggaagacatgggatattttcaccagcctcattcgctcaccattggtaccttcagcagaaagaaatgaagtcctctccattttaactttgcttccagcctggccaagagaaaagactttcagacttccctctaaatcagctgcagtgatagaaagcagactaggtaacttcagcatgagagggagggacctcattgcaggaagcaaaagtcacagtagagttaagactcttgaaagaagcacttttattttcttgaagaattgacagatctctgcttcctgtaatgttttgtgcaaatttctgacagtgctattttcccttcccataggcaatgtgaagtattcatccggccaaccaatgtttcctgacgtacagtgttgcccttttcagcaaatgccaattccaagttccattaaatcagaagctccatggctccttggcccacgatgttgagtgctgactgtgtgttctactgaaagagtaaaacactgactatccaaagagaaatggatattttgtttttataataaccatatattattgttttcttcttccctttctatgcaagtgtaaattaatgaacagagaggtatttggaaatggtaatacatttgtcacggatttgtataatgtatacagcattgggaaagtgggtgggggctttctaatatgataccgtctttttaataactatgacaaagcttacataagaattagaagaccactttacatttttacattccttctgctgttcatattaaccttgcacaattacttcattttttctttgactcttttaccacaatgttttggttatttataatttatcagccatatgtttatcagccatataaccaactagatcccaaatagatccatgtatttgtttccgtgatttggccacattaataaattcataaatttcaatcaaatatcttatatatacacacatatggtttaagctacagccctgtgtatgccgtttaactttatttgacgttgcccacttacttctttgctgaccacttggataaccgtaataaaaatcctataagcctaaatggcatttcttttgggatatttttcctgcattttattccctttttatataagtaggaattaattatttattttatgtcttaatctatttgataaagaagactacattataataatctcaaagatcatattaccaaaggttgcccacttgagcatattttcattttgacacagaaacaaaatttagtacaacctttcctagttcccatgtcttgattttcatcattacatgcacagcagacctttacctattgtgataccagaacacatcattgtctttggttcccttcaaagagaattttattgttgttttgtattttcaagtccttaatagttcttgaaactcctagttgttttcttgttgaaagcagacacacatttagtgcacggcttattttacctttcgggtgaaagatcagatgtttttatacccttcacttgatcaatatatttggaaagaatgtttatcaaaagtctatgtcactgcttctacagaagaatgaaattaatgcttaggtgatggtacctccacctacatctttttgagtgcattcaattatgtattttggtttagcttctgatttaacatttaattgattcagtttaaacatgttacttaattagcaaatgtagaggaaccaaaaaaaggtgaaaataatatgttttgattcaaacctaaagacataaaaacataaagacattttaactttgggttctctttagctgggatctggccagaaggaggcttaaagttagaaattgctattattttagaataggttgggtgggttggggggcaagggtgtctatttgcagcagagatattttgaaaagaagaaaattgttttatataaaaaggaaagccatgaccacctttctacctcagatccatcttcatccattgcattggaaactgctttatgctgctgcagtctgcaaagtctagagcttttatcaggccatgtcatacccaagaaagcacctatttaaagaaaaaacaattccctgagctctcaactccaagttgtagatttggtgtcttccttgttcttactttaaaaagtcatgtgttaattttttttctgcctgtatttgtatgcaaaatgtcctctatctgctattaaagaaaagctacgtaaaacactacattgtaaccttctaagtaataataaataaaaagaaatatattgcagtaacaatgggaagtaagtatgtagttcttttgaaatatgtggtaaagaactaatcacagactatcatctaatctggttacatattgtatttttcatcctgaataaaagtaattttaacacaagatgactttgatattcttcagctggattcactgatagaatgtgagttttgaatgcacatttatgaaaacaagatatagagatagcctgtgtcctgatacatctacattttttcctgcagtttctctcatacacactaatacagtctcctgttgctctcattctctctctctccccatctcttacacatacatataattatatgattctcaatttattttccagatagaaggtttattgatagagaaaagtaatattggatgtaaaaatgtgtacataaaacctgttgagtgttttaataactagatgctgttgacattaagttcctttcaaatgtacttttagtttcatgctctcaaatactgtatgctttttatccgtacactggattttaaccactctagtaggtttaatcaatttctgaagccattcagtgggaaacaatgttgagaatcatgttgctttattctaaaattaaaagctgtctatgaactagaaaaatcatctaaaatataatttgttaaaataaagaaaactgatacattctgatgaacaaacattttaaacatcctgtgtaccactaagtaatgctgacattaagcattcctgaaaaaacacttgatttccagcaacttgttgactaggtagctgaaaatagaagtgcgaacaaatgaacaagttttgctttcatactgctgtggtttgaatgtgtcacccacagttcatgtgttgaaaatttaatccccgattccatagtgttgaggggttggacctttaagaagtgattggatcatgaggtcagaggtcatgaatggattaatgtcatcacagaagtgtgtttgctatctcaagtgggtttattaccaaagcacgttgggttctctcactttctcttgcatgttctctgccctgtcaccttccaccataggatgacgcagcaagacaggccttaccagatgctggcaccttgatattggacttcccaacctccagaacgctgagaaataaatttcttttctttgtaaattacccaatctgtggtattctgttatagcaacacaaaatagaataaagatgtatactgtgccttcaagttgttatatatcacatatatatataatatatatgttacaatcaaggcacagtatactatatatactgtgaaggcatagagatagatgatagatgatagatatagatagatagatagatagatagatagatagatagatagatgatagatagatgatagatagatatagatagatgatagatagatagatagatagagatagacagacagataatctttgtagtttgctcctgtgtatcttttctcccacccacattcactgtttcagtatgccagctttttcaaaggcctttctaaattcattagtggagaatttaatgataatacagtaaaccaccactaacgctactacttaaacctatgagtaggatccaaaagcttcactgacatacaatgtcagcttgtgtttttgtgaggttaattaagtaaccagaatgaggctgctacagacagcagg

SEQ ID NO: 371 - DNA, 42 bp, Homo sapiens
gcggcagggggaactggcccgcaaggccctggtgatccggct

SEQ ID NO: 372 - DNA, 46 bp, Homo sapiens
ttggccatcttgccagagtttcaagataatccaaaaactttaccaa

SEQ ID NO: 373 - DNA, 43 bp, Homo sapiens
tttcattaagtcataggtctcctttgagaatataatgaaaact

SEQ ID NO: 374 - DNA, 24 bp, Homo sapiens
aaaagaatataatatccagcctca

SEQ ID NO: 375 - DNA, 65 bp, Homo sapiens
ttgtgatggcagatcacaaaacacattattagtggtagctttgactgtgtcaccagcaaaaatca

SEQ ID NO: 376 - DNA, 48 bp, Homo sapiens
ctacttgggaatgagacataatcatctacttgtgacaacttagagcca

SEQ ID NO: 377 - DNA, 46 bp, Homo sapiens
cgccaggcagaacgtgctgattgacagagaccaggctgtgcactag

SEQ ID NO: 378 - DNA, 62 bp, Homo sapiens
gggagtagtggtggcagcaaagggacagagaggagacatgaatttgtaaagcccacttctag

SEQ ID NO: 379 - DNA, 46 bp, Homo sapiens
agaaaagctaacacaattttttgtatacattatcagttagtgctga

SEQ ID NO: 380 - DNA, 47 bp, Homo sapiens
agcattattcctacaagccttttccctttgcaaagtcaaatatacat

SEQ ID NO: 381 - DNA, 74 bp, Homo sapiens
aaaatcatttggtaattcaattaaatcatgcatccaaatttctaacttttattttattagaggcttcaccctta

SEQ ID NO: 382 - DNA, 46 bp, Homo sapiens
cccactcctcctttgtcttgatgaccttttcaagctcatcaagctg

SEQ ID NO: 383 - DNA, 49 bp, Homo sapiens
cctaaaaaccaagggaacagcaaacccagtgtgggccaagtgtgcagtg

SEQ ID NO: 384 - DNA, 23 bp, Homo sapiens
ttcatgtttttcagagatgattc

SEQ ID NO: 385 - DNA, 45 bp, Homo sapiens
catccgctcttccaaagtgtttaaccaggtagtttcaagatccaa

SEQ ID NO: 386 - DNA, 36 bp, Homo sapiens
atcaccttggctgcctatccttcacttctgcaacaa

SEQ ID NO: 387 - DNA, 40 bp, Homo sapiens
tttgcatagcatgctcagcctttgttaaccaacagataat

SEQ ID NO: 388 - DNA, 42 bp, Homo sapiens
cttccattgactaaggtgggagatgtatattaaggcacagaa

SEQ ID NO: 389 - DNA, 34 bp, Homo sapiens
gaatgcagatcggtggttgccaggggctgggagt

SEQ ID NO: 390 - DNA, 23 bp, Homo sapiens
gcacggttatcatgagttcataa

SEQ ID NO: 391 - DNA, 33 bp, Homo sapiens
ctttatttttcaaattctgtgccaatgtaaaaa

SEQ ID NO: 392 - DNA, 23 bp, Homo sapiens
aagggtttttcatataatgagga

SEQ ID NO: 393 - DNA, 49 bp, Homo sapiens
aggagaaagaaaaaatatcatatatcaaatgtatcacaaataagtctat

SEQ ID NO: 394 - DNA, 40 bp, Homo sapiens
acagtctgattcaaagaacaaaaatgaaactgtttttaga

SEQ ID NO: 395 - DNA, 101 bp, Homo sapiens
caaaagtggagaacatattcaaaggatagagtataaaatgttaaggtatttggcaaatagatagaaatagattagtgattgttcagaggggagggaattgg

SEQ ID NO: 396 - DNA, 50 bp, Homo sapiens
gttttaaaaaagtcacaatataagacataaaaaaagcattcatgacctac

SEQ ID NO: 397 - DNA, 23 bp, Homo sapiens
gaagaaaaatgaactgaccctgc

SEQ ID NO: 398 - DNA, 42 bp, Homo sapiens
ttttacgataactcagaaaaggtcagaatttcttcaccatgg

SEQ ID NO: 399 - DNA, 47 bp, Homo sapiens
cagaaatccaatcatgttctttcacaagaccagtgagagagagaatg

SEQ ID NO: 400 - DNA, 51 bp, Homo sapiens
acagatcaccttgtctgtttatacagcttcatgattcaaaaaaatactgaa

SEQ ID NO: 401 - DNA, 65 bp, Homo sapiens
ttccccaaaataaagaaggcattacaaattaaatagttaagaaaacgtgacgttgtagagtcccc

SEQ ID NO: 402 - DNA, 43 bp, Homo sapiens
cagggccccaagcttagagtttggtctcaattacatacagcaa

SEQ ID NO: 403 - DNA, 45 bp, Homo sapiens
atactttaaaatcctttgtaaaatcctttacaagccttgcccttg

SEQ ID NO: 404 - DNA, 46 bp, Homo sapiens
cagcagttcccgtaagttgaagttcagaccaatcattgtccagtag

SEQ ID NO: 405 - DNA, 35 bp, Homo sapiens
aaattgaatattccttataaattatactaaaccac

SEQ ID NO: 406 - DNA, 47 bp, Homo sapiens
aatgacaactgctgatatgaaaagtggtaaatcgttaaggctagtat

SEQ ID NO: 407 - DNA, 29 bp, Homo sapiens
ataatggatgcattcacttctaaggagat

SEQ ID NO: 408 - DNA, 48 bp, Homo sapiens
gaatatggatattggcaccaacaataatagtggagaaaaggatggaga

SEQ ID NO: 409 - DNA, 45 bp, Homo sapiens
cttaccttacaatggtcatactggagctgtaaggctggaacatct

SEQ ID NO: 410 - DNA, 68 bp, Homo sapiens
acacatcccaattttagaagacaggggagagaaggaagaaccaggaagggaaactgagaaagagctac

SEQ ID NO: 411 - DNA, 54 bp, Homo sapiens
agaatgagagagagagaaggagtgctcagagggagctgcagttcaagtagagaa

SEQ ID NO: 412 - DNA, 54 bp, Homo sapiens
ttccagaataaaagggcaaaacaattctctaaggaggtataaatggtcagctag

SEQ ID NO: 413 - DNA, 40 bp, Homo sapiens
cggcaggatgaccagcagctgcgtgggcaaatgaggcaag

SEQ ID NO: 414 - DNA, 48 bp, Homo sapiens
caggaattctgatctggtactgagaacagccaggggaggctggcagca

SEQ ID NO: 415 - DNA, 71 bp, Homo sapiens
tcctggtatgaggttgtgagctatacagtcataggaaagctaagaaaatgaaaacctgtacagagaagcag

SEQ ID NO: 416 - DNA, 27 bp, Homo sapiens
tatttcttgccacatgactgcccatct

SEQ ID NO: 417 - DNA, 35 bp, Homo sapiens
gactaccttccacaaatagtaaatgcaagttatta

SEQ ID NO: 418 - DNA, 29 bp, Homo sapiens
tcaatacagatatgataaagatggcatag

SEQ ID NO: 419 - DNA, 41 bp, Homo sapiens
taagtgtaaaaaattcacaattaatatagaagcacagggaa

SEQ ID NO: 420 - DNA, 48 bp, Homo sapiens
gaggaagaaaaatggtttagaatttgtacaatttgacaaatatcatta

SEQ ID NO: 421 - DNA, 39 bp, Homo sapiens
ataacaacagcttgggttctaattaatctcaaatatgaa

SEQ ID NO: 422 - DNA, 45 bp, Homo sapiens
gctgtacggtaggcagaaaaacgtacattattcaggtcagctgaa

SEQ ID NO: 423 - DNA, 41 bp, Homo sapiens
agtggcccagaggccttggctggagggcagtgggagaaggc

SEQ ID NO: 424 - DNA, 31 bp, Homo sapiens
gcaccagaagtgtcatgtaaggaaaagaaca

SEQ ID NO: 425 - DNA, 45 bp, Homo sapiens
acttaatgttccttgaacaccatctacaccttaattctcacacag

SEQ ID NO: 426 - DNA, 41 bp, Homo sapiens
agaaggaagattgtgaaattaagaccttttaatctggtaag

SEQ ID NO: 427 - DNA, 46 bp, Homo sapiens
gaaacaactctggcagacatcatagttaaaatgcttaaggcttcta

SEQ ID NO: 428 - DNA, 47 bp, Homo sapiens
gactttgaaaaggaaagagatgaagtcagtaaggtgactggagcatc

SEQ ID NO: 429 - DNA, 47 bp, Homo sapiens
ctctaagttgtcaccttcaagaactgtctggacaggcaggtaaccaa

SEQ ID NO: 430 - DNA, 46 bp, Homo sapiens
tgctatcagtgagaaaagacccattagtcctttccatctgggccag

SEQ ID NO: 431 - DNA, 45 bp, Homo sapiens
cacatagtaaacactatctagattacaaaattagtacatatcaga

SEQ ID NO: 432 - DNA, 55 bp, Homo sapiens
ttcctagaaaaggtttatcctaagcattgagatcagagagctagatgaagcaatt

SEQ ID NO: 433 - DNA, 64 bp, Homo sapiens
ctctctactgacttcaggatctgagctgggctctgcggctggctcactggggactctcctccga

SEQ ID NO: 434 - DNA, 45 bp, Homo sapiens
gacctccgtgagatccgtgctggtgtcgtgcggtggggccagcag

SEQ ID NO: 435 - DNA, 37 bp, Homo sapiens
ttttgaaagcatttcttggtctatcagcaaaaattag

SEQ ID NO: 436 - DNA, 35 bp, Homo sapiens
agtttctcatatcccatgtgatttaagatttagtg

SEQ ID NO: 437 - DNA, 42 bp, Homo sapiens
aaaataatagcaatttctaactttaagcctccttctggccag

SEQ ID NO: 438 - DNA, 4042 bp, Homo sapiens
ataaaaattagccaggcatggtggcaaacacctgtaatcccagctactcaggaggctgaggcaggggaattgattgaactcaggaggtaaaggttgcagtgggccaagatcgctgccactgcactccagccttgacgaccgagtgggtgagactccatctcaaaaaaaaaaaaaaaaaaaagagagagagagagagttggatataaaggattggatcatcaatctgacagattttatgagagtctaaaaaacttttttcattttttataggctctactactgctaaaaatttatggattattatatgattacattctttcattcaagtacataactataaaggatttgctaaattcttaagtgtattttattatattcaagaatcaaaaactttgttcagaagaatgtctataaaagtttatcatggaaaattaagtttgcccagggaaaaattctctttcctggaaagaactacagtgtatcactttggagcagtaagtctaatgcttttcttcactattggtcttagccaagatctccacttctatgctacccaaagcctttattcacccataaaagagaaaagtcaactgtttacacactactttattccatttgcccattatcagtaacacttcttcactataatgtttcacttgccactctcctcaaggtgatttttcaaatttttctcttcttgataatgaaaatcccttacaggttgcaaagatacagcagaaaaggtgatcagagtacagaggaaaatggggagaaagaagaataacagaaggctatttaaatagtgatagccactgaggttacttgccattaatggccagaggaatttgagtacacttaaggcaaaggatgactccttctaattgccaaatgcagaatctttggttctcaggagacagaatcaaagtttcaccacgaacaatgcatcccagtgtgaccctccgtcttccacacctataaaatggagggaacaccatcttcacagaaggctaggtgagaaactgagaatcaatgaatgagatgttgctttagaagcttcaagccctatacaaatgcaatttattgttacctctgccctagatttcccttccctcaaatgatattctgtaaaagccagatgttcttactgaaaccaatccagtcaagtcgatattcactaactctcccttcagaacgcttccggctgtcatatggaccaccaagcaagagtgtatgaaataaacataaggtgtttaaaaaataaacataaggtgacagccttaaagacaaaactaatgtttcaattttttaagattttaggaattatacaatgaatatatgtatataatttttattttgtactatattttatgtatatagcacatatatatccaacagtgtgcattatgatggaaatgctgtgtaatgcaaacactattcattaatttactataggaaccaaaacctaggaacgattgagatagtagaaaaggaagccaagcggacaagagtttgctgctctgcttgaaacacagtaaaagaaaacggtgagtgccaagaactgccatttacactcggaagcgctccagggaaggttaatactactgtgattaatactgtttacagagccaataaattttaggtaaacacccaaaggagagttaaagagttgtctcatcggtcccataaaggctggtaaaaggggcggggaatggttccacgccaaccctgtccgtcaccgcagaactacccacaagcttcgcattcctccacctctcccctgaccctgagctatccgcaggctgcgtctcccacgcccaccgccaacgaaccgggagggcccagatcgacttcctgaggccggtgcaacttacaaaggaatggatgcggtcgctgccgcccggccgggcggccgggagggtcggctcagacctagggaatccggcctcccccgagctccgcgcgctctggccgcggcgaccgctgcactgaccctcccaaccgcggcagggggaactggcccgcaaggccctggtgatccggctgacctgaaggctgggaaagaggaggccctgtcctgaacacctcagagagcggggccgtggagttagaacccgagctctgcagttccttgtaaaataaagtgctggtcccacagctctctcggaggtcgggcaacgttttctccctcctcctcgaaaaacgcactggaatgagtccctttcataatctgaggcttggaggaaaaaatcctttgaacaacctgccatctgaaagttgcacagccttcaattggtgctttgttggtttttaagtggccttgagcaaccacagcctcggaccccgggccaaagcggggcatgaattaccttgtcagttgcagcaagagatccccagagtccggaaaaggagagccggcgactgcgcgggactacacaccaatggggcgcccccctcctcctgtcccctcagtctctccagggccgctgccagggagcttggcgatcgcgccacactctccggagccccacccttgggagcagcaaccacccagaggtcaagcacgttccccgccgggcggctggctgggaagcgctccgctggccgccgaccacacagccaccctctgcccaccctctcctgtggacaccgccggagccccgccttccccgggcccgggtgtctgtgacagactctcctaagaggccacgtcccctcttgcaaatcactggcccagcgccctgcaccgcgcgatgcacggagggcgactctgtcaccccggcggggaggaagattaggggagcagggaggcagcacagagctggtcagataagtttggatcgttcacaactagtacggatcccaaggacctccacgcccgagctctccacgcctccggcattctctctcgcaccgcggggagctaaactgaggccccgaggaaagggcacgcaaaagttactcccatcttcgactctgggacttgggaagcagctcgggacgccgatcccaggcggaagaaccacagaaagagccatcctcctcccggcccccgccccattccctcgggggctgtagtcacattaccagcccgaggcttcaataatgcatgggcttacctgctgcccgcgggcctcctcgcctgccggtcgccaccgccgcaccccgagctggccaagggctcctctaggagtttgacacggagtaaccgcgggggtgtgtgcgagtgttagtttggtggtgcgatgtatttaaaaaaaaaaataaagcttggagaagcagacacgaaccgaaattttaaaaaaagaaagaaagaaagagaaattgacacccgactgaaaacgccccttacttgtgcaatcttcctgcctggtagttccgccaaaaacaaaacagtcaaagcgcaaacctggaaggggcgcgcaggcaccaactttgccaaacgctacagagttttccgtttgcagaaatgacccaaaagaaggggggcgccgctccccgtgattccccaatcggcttctggagccagaggctcctcctcgcccctcggcgggagaaagcccgcggccggctgctgctgcccgcttccctgctccgaggaaaaacgactccacaactttgtgcgcgagagaggctcgctccttcggcggctcctcctcctcctccccgctgcgggcctgcccctttgttggagccgagcgctggaggcggaggagggagggtggggcgcaggaccgctgggtcgcgcgttgccgcccccaccccccgggaaggggctcgcctccgggcagccaggggtccgctctccagatgagaagggtgcagatcagcgccagccctccggcccgcgcctctgcagcgctccggctccccctcggcgctctcgccccgccgccgccggcccagcaactttgttccggaagatcagccccactacgttcccgggtcagcgtctgccgggcctcggcggtcaccgcggccaccgcgtcgggaacttggcgccccaagtcacctgactgcgcgccccgtcaatcagcgccggccc

SEQ ID NO: 439 - DNA, 4046 bp, Homo sapiens
ctaatttagttacctctactgagatcatgtatgatctgttcagatgtgctagagtaaagaaacagaataataggtttaaacaactatttcctaaagctatttgaccataacatccttttgtgaattacacattaacaatcctagaacttttgatcttttcgaaatactttgggaaataatgatctaaccaattcctaatattagattttcatggtgtttacaatgttttctattataaatgatactgtgatcaatttcttgagtgtacctttttatgtattgcctagggaaaaactctagaaacagaattactcagttaattgatatgcatgtgttaaaaacatgttatcatttttgccaaattgttctccagcaatattttaggttcatcagcctttttaaaagataattttaaattaaaatagtttgggagtttatatgttcattatatatacacggtatttctgaaattagataattactcttttatggacacggctaaagtacaagttataaatatcaaaggtcttactagaatgaaggctgactcagaaaactatttaggaatatacctcctcacaatttatagaaaatgactagtatggagacattaaatcgtctctcttccattttcctctgttatatttacatatgtctgaatatgtattccgtactcctaagatgatattaataatcccttacatttttgtagtaccttataccactaaaacatttaaaacaaaaagaattttacaggaagagaacatcctcaaagcatattttaaaacaagatattaagctataccttcaaaagacccgtcaagctacacaatagttgctacatatttacagccaaatctgtaataactaaaatctttatcaatcaaccaacaccggtatcatggaggaaaatgtgtattttaagacagttaatttagatcttattttcactgtgtatttctacagtttcacataataagaaacaagctcctaacagaacataaagatggttcacacagcaaaaacaggctttgggttccttttttgtctttaaagtgacactggatgtaattttatacctcaaagtaacttttcaaagttacttaagtatagtgttcacactcagggtggagttctgtgtaattttcaaggctgagaagtgttctgcctgttcaaaaatatctcccctttgagtttgtctcagaatcatatttgaagctttttaaaaatacagaaatttttattcaatgggtctggaatggagccaatgcatctgcgttttttaaaactccccagttgattcatctgtacagccagagtcaaaaagcactcggttatataaaaagattggaggagggggtggtatcctgaggaccccaatttaactgttcgtgtgaaaaccatgaatctgtctgagtctggtttattagattacctaggtgaaaattttaccttgagaaggctcataagatatttcaaggtaggacacctgttggcctatcaatggctatgaacagggatgggggtgaggatatatggtaatgaaatcaaactgtgaaagatctttcctgccagaaactgtggcacttcctacattaagcatataatcccttcaatttccagaaaatagaaagagaaatgttcggtcgtattttattttaatggagtagtcttccaaatgaacaacctttagctacaagcagcagtttcactaagcacaaaattgggttgagaaaggataggacactcagagatattataccttttacatataccttttacaaaattatagtcatttgtcagaattcagtttcttaaaagaacttcacctccaagaagttcttgcaagaacaatgcaaatcaatccaagaaacataggttttctaaatacataaaaatccatagctttcttgagcttcctttacctaccagatctggacttaatgatatcactgaattcgttctgcccattgtcaggactggcttcatgttctccatacttggccatcttgccagagtttcaagataatccaaaaactttaccaagtcctctttctaaggctttcaacttcctacgatggttcagcttgacatcaatacctaaaaggaaaagggaaagtactgacttgaaaaaatgtatttatatattttatatagttattcgtagtaactattcattcaccaaatatttattgagtgcctaccacgtgtaaagcaccaagccaggcaatggtgttatgactatgaacaagagacatagcctctgccattacggcgcttatgcacactaagcaattaattacataatgaattatttcattacaatactgacagactacaaatcatacaaaggagaagcacagagtattaagagcacacagcagaggagtctgacctgccctgggcaattagagaaggctttcttgaagagacatttgagccaagcctttaaagatgacaagaatttaattagccaaaaagggaaacagaaagagaaaaggtaagagcttcctatgtgaagtggcagaaagaatcatggagcagtcaaagaatggagcacaagccagtgtttctggaaagaagacagccaagagacaagtgtacctgttgaaccaggtgaagaagctgggcaggaccagggataggaccatggagaacaggtcaagggtttgtgtctttatctgaagagcaatggggagccagtagatggttcgaaggagggaaccaacatggtcaaattggcctttttaaaagatcgtcaagggacgggcacggtggctcatgcctgtaatcccagcactttgggaggccgaggcaggtggatcacgaggtcaggagttcgagaccagcctggccagcacagtgaaaccctgtctctactaaaaatacaaaaaaaaaaaaaaaattagccaggcatggtggtgtgcacctgtaatcccagctactcaggaggctaatgcaggagaattgcttgaacctgggaggtggaagttgcagtgagctgagatcacgccactgcactccaccctgggcaacgagagtgagactccatctcaaaaaaaaaaaaaaaaaaaaaaaaaaaaagacgattgtggcttgtaggtagaccacagtaatatgtggggaaccagtgaagactatggcagaatatagcaaaatgcaaattaaggaacctagctcatgggtatatgaatgctgaatgaaaatttcttgcaactcttctgtatgtctgagaattttttcatagtaatatgttggggaaaaattcctaatcttaaccaagtgatcaaaattcacataaccaatcatggggcatcatgcaattgaatggaaaatcaccacatcatctacacaatatccttgccaagatgttgaacgtgaatcttctcatgagcagacaaatctagactgtggctagttttcaaaagaaatggcctggtttcttcaaaactgtcagcgtcttgaaaaccaaaattacctgggagagggggagctttgtgaattaaaggagactaaatagacatgacaatgaaatgtaatctttgattgaattcagaattttaaaataaaacatttgaggatcatttgaaaaatctgaatttggactatgtattagacaatattattgtatcaatgttaaatttctttaacattaattatggtattgttgcaggagaatgtctttgattgtaagagacatgtggtgaaatatttagcaatgaagtgtgatggtatcttcaacttaagttcaaacagaatagcatatatctgtctatactgatataggtatatttaggttgatatatgtatgtagatgtatatatgcatacacacagacagacagaaaaatgcagtaagtattgtaaaataagtgggaaaactaggccgggcaaggtggctcacgcctgtaatcccagcactttgggaagccaaggcaggtgcatcacctgagttcaggagttcgagaccagcctggccaacatggtgaaaccccatctctacttaaaaaaaaatacaaaaattagctgggtgtggtggcaggtgcc

SEQ ID NO: 440 - DNA, 4043 bp, Homo sapiens
ttgcctttatctgagacaagcaagactgtgggatcagctttggggtttacgggagatcaggagttcagattttcagatctgaacatagaagatgtgaagtaaacaactggaaatgcaagtatgcagttcagaggaagaggtctgggctagagatagaaatttgagccagcattcagatagtatttaaaccaggatactggtgagatgacaaacggcaacagtggggacagagaggaggtccaaggactgggtcctgggccctccaacgttaagaggaagaatcagcaaaagataatgggtgggaaaccaggagcgtgtggggtgtcctagaagccaaatgaagaaagagtcatggaggagggagtgatcagcagtgttgatgctattgagaggtggaataaggtaaggactgagaacaggctactggatttagcaacaaggaggtccctaataactttgacaagagcagttttactggactggtagggggtctgcctgatttgagtggtcttaagagggaatgaaaggagacgaactgcaaatgttggtacatacaatctttgaggagctctttcataaaggggaccagaggaatggcgtggtagctacagagacaggtgggatcaaagtaaagttttgctagaagaaaaacaatagcatgtttgtaagcggatccactaaaggggaaatcatagggatgcagaagagagaagggaggtgactttgagtaagtaaaggaggatgggtacaatgtacacggttagggtggccttgggtgggttctggttgaggatagatgtggtattgaagtttctggattcctctttggtttgcttcaattttcttagggcaagagtaggcaaagtcagccgggcatggtggctcacacctgtaatcccaacacttcgggaggctgaggtggatggattgcttgagcccaggagtttgagaccagcctgggcaacatggtgaaacctcttatctacaaaaaaaaatacaaaaattagccaggcgtggtggcacatgcctatagccccagctacccgagggtgggaggattgctggagcccaggaggcggaggttgcagtgagccatgctagtaccgaaaaaatgggacgcttaaattcagatgacagaggggctgccaccataaacaatgacctggtctagccagaatatacccaccacactgggagacaagatcactagaaagagaacttagagaaattaagaggacagagtattagaaggatcatcaatgtttacacccaaatcactaaaacaagagtaacttttagagagagtgacagagctaaactcactgagaaatgagagtgagcggtggagggagggagtgacatctcaccaattaggttgagttggtgatgcaatccgatggcaggagattgcagctggggaatctggtctgaatgcggaatgaggagcaaagggccattatctctctctcctgtagtaggagagggctgggagaaaagaacccacacaaaaggcagtcacaacaaacatgtctacactttgacaaagaaatttcttttgatgtcagaaaaaataaagcactgtgatatccattccacctgagcttgatgaagcccaagtttcattaattaaaaaaaaaaaaaactgaggcagactgttaattagtaatctatgtctgattatttgccacttttagcaacaaaagggaaatattcatcaacaaataaaaatacattatatgcaaaactgggtcaaacattatcagaaattttgcccttcaaactttgtgtcttctcaacctaattctagcaatcaggtcttttgtttgagtggctttaaggcagtagaagtaaagtaaggaccagaatttgagttacagcaaaagtgtgagaccctcagttcgtgccagcgtattggactgccaatctaatttcagaaaaaaagaaacattatgaagacataaccctataatatgtcactcttcctctaacaagacttaacttttcattaagtcataggtctcctttgagaatataatgaaaactgtggaccctttttctaagaaaatatgcagaaacacaagtgtaaaaacttctgcacatattgcaggatttattgttaacctcttctctccctccccaaacacccagtcaggctaggtagagtaatatctgcaagggggcttcctatgcccttgggagataaatacagtcaacaactgcggcatcaactaataatatctactaaaaaatattacaaatcaaaaaccacttcttaattcttcatcttccgctgccgtcatctaccatccagatgctcattttagggtcagtcaaaaatatctcagaaaatacaaagataaataaaatatgcaacagttcttgatttttttttttttcaacagagtcacactctgccacccaggctggagtgcagtgatgtgatattgactcaccgcagcctccacctcccaggttcaaattattcccatgccttagcctcctgagtagctgggactacaggtgcgcgaccccatgcccaggtaattttttttttttttgtatttttagtagaggtagggtttcactatgttggccaggctggtcttgaactcctgacctcaggtgatccgcccgcctcggcctttcaaagtgctgggattccaggcatgatccaccacacccggcctcttgaatttttaacattatcttgcaaagagctcaaaaaatgactcaggaaagtactcaagactccagctgccagttttcaagggcagaccccagcccaagccagtctcatacatgtaagagaaatatatatattacatatttttcccagatatctccaggcacctcaaaactcaatctagaacttcacttactatccccttatgcactgccctctccacaaaacctagaaagaaaggcttcatttgcgagtgttaaagtcaaaaaccaggcttctctctccatcccatccaccacccatcatctgaagaccaccaccatgtcctatcaggtctgcctcctacctaaagcttctaaactctcccctctcctccttcccagctacctcaatctcagttttggcttcaatacctcttatcctctaactgtgacagccacccaaaggtcctccagaaccccaggcttgcctcatccagcacacaccccacaccatccatgctccacgtggcttctagagcaccactcagaagagcaaatctgatcagatcagccctctgctcacaagctttcagaggaagcaaggccttcccaaaccaggagtgagagagaggaggccatctcaagtaaccaaaaacacagagaaaagggaaaataaaacagaaagtatgtaacctgatattacagctacggtttgtggtgtgtggtgtgtgcagggtgtgaggtatgtatgtgtcagggaagtagttcggtgaatactgctcctagaaattggaagctttttttatttaatatgtcatatctttcagacatagaaatagacaataataggcaaaagaaaatggtacaaggtccatgactgcagtgaatctcctatccagatctgcctttcaggcaaggcaatgcacaaattcattcccccagcagctgagggctcatagctgagcatccgtccaggaactgcccttggccaagttaccttgcccagattttcacctcacctccttcccagggtcagccaaaagcctactggtcaaggcaaaggtccccaggctcaacacattgcctcaagttgggaaatctctgaagggccatcccagcaccagcattccctatggatccaatggtggccctgctgtaactcaactacacttcagcttttccctggcccagtccttcttccctcatttctttcattaacaggaattgttctcaagtgcacacaaatctctgtctcaaatcctacttccaaggaactgggcttaagacagtcatcactcagttcacaaatcagcattatttcatattaatttaagattctatttctattttcattgaggaattaaatattatagataaaa

SEQ ID NO: 441 - DNA, 4024 bp, Homo sapiens
aatcccttatccacaatgccaggatctgaaaagctctggaaaccaaaggctttttccataacccatttggcagcaaaacgtgacctgaactgacctgaggctatttataaccctgtttgtgttccacttagtgtaaatattcatacattttctgcagaatgatgaagatattggatgatagggtactgtcccaaactcctctggaggctttatgtaacatagggcatatgggccatagcctttctgaaatgggaaaaagaaaaatcataaattctgaagcatatctggtcccaaggatttggataagggatggggagttttaccatgaaggaggttcgctggccaacccaagagcagctttttgtgctagactttcagctacatttcccatcaacaagttgtcacgatgtctgagcacagcaacagctccgccctgaagaggtcagcatccaggtcctgggtctgggctggccagctctagggagtggatggggttaggagctaaaaggctgagcagacagggaatgcggaaaccaggcctgcgccctacttcacttgcactcagacaacccaagccatcaagcacattcttatgacttgtgtagtcattttttttttctagattttcaaagtgaatcttagtttttattcccaacgctggctccctctagtctgggcaaactgccatttaatcacaagggccactcaaaggttgttttttctctttttttaagctgttgaaaacattaagctaaataagtgaatattctccagcctccctctctgagcccctccctacctttctcatccattaaaacagcactccatttcattacaaatattctactcctagtgtattaaagacataacatgtatattataaaaagtaaatatgaatattaatgaaacagaagcatgaggaaaagggaaaattttaagaactgaatcaatgtaacattctctttgtagcatcacctgtagacctagacaagcaaggaccttgccttaaatcctgacttttagagggcctcactctaccctcttccatccccatctctcccccagaaatagagaaatcagaggaccaaggggatatgcaagtcctaaagcacggtctagaggcacagggtcctagtactcactgctcaaatgagcactgggctctttcccaagcaagggtggaccacactactgtttgcaagtggggaagagtgggagaccatgggtgcttggccaactgaccacaaacttgggtgcaaagcccttcccagtgccaaatggagccagcatgggcagacaaaggggaaagtctgcaaactggagccagggggcagctctctccaccaccatgttctgtcatagaatctgaggacttggaaaattccaaactcaaacttggcccatgaaattgtgatcaaagcatatgtatatttattattatccattctcctttctattttcttttctttttttttttttcagtatcagaaacctgctcttctcctccatccccacagttctagctcagcacaagccatatttctcaacctcccttgcagcaagatgagtccacgtggctaagcagcagccagtgggatgtgaaaagaaatcaggaatgcaacctgagggccatgcacgttttaaaaaattgcttattttttacttctcttttctctttccttggactagaacttgacatagtgttgaggggcaagcctcatcaagaaaatggaacaacactttggaaaggcagaacaagagagaaggaaccaggatccctgagagaccatatgaagcggagccaccttcccaccctccatcacccaccaactctgaactgtaaggagagaaagaaataaactctgattttatttgagccactgtattttgaggtttctttggtacacccctggagcctctctgtaactaatacatttgcaaatgatctacataaactggctggaaattagttgtatgaatccactatggtgacttcagccaaaagaatataatatccagcctcagcaagtaaaataaaataaaatgggagaggagagctactgtgtgatgcagttattttttcaagaattctaccagaaaatcatatcaaatatataaacatggaagagaaaaactaaaagaattccacaggacaattagccatgaaaaggcttagtctatcctagaatgtcttgttattaaatataaagaagcagaaaaagggaaattctgtatatatttaagaaacaaaaacaaatcttcctagtgcaatatgattaaaactatttttacatgcttattttaaaagactggaaagaaataaacccacattataataattatttgtatggaggtaacggcttacatttcttgagtgcttctatgttccaaattgctttttttttttttttgagatggagtcttgctctgtcacccaggctggagtgcagtggcgcaatctcggctcactgcaagctccgcctcctgggttcacaccattctcctgcctcagccttccgagtagctgggactacaggcgcctgccatcaggccggctaattttttgtatttttagtagagacggggtttcaccgtgttagccaggatggtctcgatctcctgacctcgtgatccacccgtctcggcctcccaaagtgctgggattacaggcatgagccaccgcgcctggccccaaattgctttatatatgttaattcacttactttttacaacacgaggaggttgatgctattactatctctactttactcaggcacagagcagctaagccatttgtccaggttcacagagctagcaggtggccatgcttacacccacagcacctgatactgtctgaaccattccctaaagtatttctacagaagagtactaataagatttttaaatcctgcaggatttttcttattattcttttcaaatattgtgtaatctaataccatgccatccttgatatctaactcattttagagataaaaatgcttaccctaaataccatcatataatctatatttctataaccccaacagcaatattgcaggttagaatccaagtgtgcagaatatttgtgaagatcagtgtagataatactgaaatgacagtgatgaggaagaaggtactagaacacagcccttcccgagcacagctcgcacaattaagcattaacaattaggttttctggagcttagaaagtgatcagtgtgaggtcatctagtccatactccttaccttacaaacaaatcaattaattgtgcagacagcttgagtgacatattcaaggtcacacagctggtgatctgcagagctaaaactggaacctagttcctctttgacactaagctaagctctttttttaaatagggcatccaggttttctagaatttagcaattaaagcagtgattttcaaattgtgttccaaaagacatgaaggaccctcagaagcctgggttgagctactcacctgccagtcccaccccccaaactctgctgtatagaaagccacatcctacctatcagcaatgcatcgtcacattcctaaaatgagcctccactggaagacttgtttgcagaaagacttccaaggcaaaaataaaaatcacataaccaagtgaagtattcgcatcgttactttccagagccccataacctgggaccttttagagtgcttagtaatctgaagaaagcttcttacgccagaattcttcccccaggaagatcctcatcatttcactaaatgggcattttcatgccaactaaaaatgtaatataatcacacaataaagggcaatcttagaagaggaaaggcagttggcaaccacgctgacaaatatctatactacactgacctcagtctgctcatttcatgactgcctgttgaaaacaacatcaagtgatcgatctgtcgtgagcatctgggaaacacagtcaaaggctgacatgcagctaatcaatcgggacaataaagatcaacaaagattgaactgatatttttctcagggattgcac

SEQ ID NO: 442 - DNA, 4065 bp, Homo sapiens
gcttgtctgcctcccagcagcctatcacgtaacttggcaccagcagagagaaataaatgacagtgaacgaaccaagagataaatggacaaattaaatggatgcaggggcactaattaactactcaattgttggagatttggaatagcgccaaggttacagctccttaactcatttacagtttaatttctaccccatatgactttcatacaacagacacttttcggtaaatctttttccatcacggagaagtgatggaataactttcatagcgtatcattagacactggacccaatccattcatattcaacaaacacgcattaagtgccaagttctgtgccaggctctgaggctgacagtggtcctatcctagatgatttacaaggttagtaagcaaaataaatcatatttagaaaatgtttttaatgactgaccttgttagattctttacatgtaactatcttatttcatgacattatttagaaaaaacgtcttttaaaaacttcctaggtcacccagaggacaaaataatttagaatctgttaactcagtaattttcacactaattattggcggagagtcatgcctcggcttcctttcaatgaacaggtggacaaaatttaagtagccacattctcaatgagtctttacctgcctgtgactgtctgccgtctccgtttgtggattcagatctcacttccatttctcgtcggctcagcgtgtcctccaaatgtagttaagactcccaaaccaacagtgcatgatttctgaagtcacaaagggatgtgtacccctcggctggagaatgtgctttgatggagtcaaattgaaaaacagggccaaacagtatgggaaccgtggatagatgagttcctccccaactgcccggaccagaatggtcacattcctgcctctgtgaatagcccaatcctggtctgctctgtctgagcctctgccaggtgtggagcctgtcgccttaaaatctgaagacgtgtgacaacacttatctgcctaggaacagcaaggtatgcatttctacaaacaccactgttgaaactgcttggtatacagagaagccaagcacttcctctcttctcaggttttccttagattcaagccaaatagaaatctgagtgaggaaaaatgttaaggaatttagctttagaaaaatttgtttttatgtttctaactcttgcaagagagcttgttctcatcaattttataacctatttttcaacctacatactccagactaattcctaatgcttttagggatccatccattaatgcactaaataatacatgccctcaaactaagaggtaaaccatgccccttcaatcaggataagaaatactactgagtgaaatgcagactgcatctttctgccaattttaatccacagccctctgctcacttcactcccaatcaccggcctcaatcaggctttctgtgggccaagttctgccagcttagagcctgcacacagctctgccttcagccagtgccctccaccaccttgaactatggacttgaatagattcctcaagaaggccttccctgaccactcaaactatcactcattccaggtccctatgaagtccccgagtgatttgccatgacagcactgcagaatgtctaccctctaagcagttaaacaactatttgtatgctctgcaatttgatgtctggttctcgtactagtctacacactcaagaggccagatgccatcatagagctcatcagttttgtcaactacacccagtgcagtgcctgccatatggggcattcacccaagactactttccatttaaaattgttgtctcttttgaaacactctgtggcacactgctgccactgctgaggtttaaggaaacaaatactcattttaagccatcatctttatcaggggttattaccaggcagggggtccatgaacttggacaggaaaagcaattagatcttttcactgacctctaacagaaatttgcatttccttccattgtgatggcagatcacaaaacacattattagtggtagctttgactgtgtcaccagcaaaaatcataaccattttcacatcaccttacaactctagcaggtatcttgaaaataccatttggctcgttgttatttcagaagagtagagaggttagagatgctagaagttcttactgaacacactaatgaaacagcaaatactactctctcacagactttttcagtattttggtaactgtatgcatggaataccatgtactctattttatgcatttaaaaatatttgtcaggctgggtgcggtgcctcatatctgtaatcccagcactttgggaggccgaggcaggcggatcacaaggtcaagagatcgagaccatcctggccaacatggtgaaatcttgtctttactaaaaatacaaaaattagctgggcatgatggcgtgcgcctgtagtcccagctactcgggagtctgaggcaggagaatcgcttgaacccgagaggtagaagttgcagtgagccgagatcgcccccctacactccagcctgggtgacagagtgagactccatctcaaaaaaaaaaaaaaaaggccaggtgcggtggctcacacctgtaatcctagcacttttgcaggccgaggcagggggattacctgaggtcaggacttcaagatcaggctggccaacatggtgtaactccgtctctaccaaaaatacaaaaaattagctgggtacagtggcttgcaactgtaatcccagctacttgggagactgaggcaggaaaatcgcttgaacctgggaggcagaggttgcagggagccaagatcgcaccactgcactccaggctgggcaacagagtgagactttgtctcaaaaaaaaatttgtctggcttcactaaactgccaaaggagtctatgggggcaatgaaggggggatgaagataaagaataaaaaccctgatctattaacagatcactatcatgagatataaacatctgatgcaccaagaaacaattatattttgttctgaatgaatgtatttttactcattgtaaaaggaaataatatttccttaaaaagactttgcaaaataaacaaaattaataaattaagatactatttttaaaacaaataaagatatttatttccttggttttaatacaaaacaactctaaaagaagaaattcccaagagacattaacaagtttaagagttacttaacagctcaactattagacacccctgacactcctaagaatattcttgatttgatgaaacttctggtaacacctggaagcttaaagtcattttcctttgtttcatcacctctctaaaaagttatcgttcctttgttaagatgctagataagcccagttctaaccaaccctttgaattactcatgtctgggtactcccatgtgtatgcactacgcatatcttaataaacatgtttgtttttcttttgtttaaaaaaaaaaaaggaaagaaacttctctcccttttttctagaaagactcatccttgaaccatcaaggccctgggcttgcaaagggaggatagcagacaggtggggttgcgatagtagacaggtggggttgcggaatgtattacactccgatttccctcacagtgttgtcctagttctagcctagcagttggaaattcagccccatctaacttccgttgttttttgtttcgttttgctttgttttgttttgttttgtgttttgagacggagtttcgcccttgttgcccaggctggagtgcaatggtgtgatctcggctcactgcaacctccacctcccgggttcaagtgattctcccgcctcagcctcacgagttgctaggattccaggtacccgccaccatgcccagctaatttttgttatttttagtagagacggggttttgccatgttggccaggctggtctcgaactcctgacctcaggagatccacccactcggcctcccaaagcgctgggattacaggcatgagccaccatgagcagcccagtccccttacttctgtaacaactctgtgaatatatgcacataaccaccggaaagag

SEQ ID NO: 443 - DNA, 4048 bp, Homo sapiens
taaatcgaagccgccatcatcaaagagcttagaaaatattccaggctgggcgcaatggctcatgcctataatcccagcactttaggaagctgaggcgggtggatcacctgaggtcaggagttcgagaccagcctggccaacatggtaagactccatctctactaaaactacaaaaattagccaggcgtggtggcgtgtgcctgtaatcccagctattcaggagggtgaggcatgggaatcacttgaaccagggaggcagaggttgcagtgggctgagatcacaccactgcactctagcctgggagacagagcaagactccatctcaaaataataataataataacaataaagtattccaaaccacacggagccagacctcagacatagatcttaaatagctgccaataaaagcagggaaatcatatttaagtattggtttcattttctaatgtggaaacagacaaagacacctacttggaatgatgaattaaaaagaaaactcctagaagttgtatttcaggattaaattataacctttctcaagaaagctgcatgcaagtagtgagattaaaagggagacaataatcgcaccaaagcccttaatgaggaggtaaagagaggtagtaataggggcacacagcttctccctctaccaggagatagaaggagtagatagaaggagtgtgctaagaggggagaattcagggtttcctcccagggtggccctcctctcacatgtgtgtgtgtgtgtgtgtgtgtgtggtgtgtgtgtgtgtgtctgtgtgtgtgtgtctgtgtgtgtgtgtctctgtgtgtgagtctgtgtgtgtgtgtctgtgtgtgttgtgtgtggcagggtttctcactggcagtgttgcttctaaacagaagtggcagctgtctggaacccagtgggtgaggcctccagtggctgacagcgatctgcaggagaacagaaaaacactacatggaagccaagtgatgccaccacttggtagaaacagggtccaatctgccagggccacaggcgcaaccctacatgactggctgcttaaagcagtcatccctgggatggcccttccagcttagaacttctcactgtagtggcaggaatgaaggccaagagttcttcagggaggcaagaattgtcatttaaggcaacagtgaacgaaattgataaaaacaacccaaatacttcaaaaagaaaggaattttaaaatattactttaaaaaaaaaagaaagagggagtaatttttctggactgtctccataatctgtttttataaatcaggtggcaacctgctgggctgtggaacaaaggtcagcaagtgagttttctcgaagcacacttgctgtcatagtaaggaaaatttttctagtttctagtgagctctagaactttcaagcttcatgggaaggtgtgaagaagagacacctagaaattattctttggtgttggcaggaaaaaaaatgtgtccaagtgtcctacagggccaccagcctatgaaccccaatgtggtcttcataatattttgttccttggtcacctacagtcacaatctctacctcagaaaacttgtgccactgcctgtcttctggctggctctccacaggtgagtgtgctgacgtccccaagccctgaaggttgtttactgtcattcagcttgcccgtggcgatgtcggagtctggattgaagttcccaccatatcaggatcaccctccatgaggcaacactttccctacctacaacctgtcttccactggccaccacctgccgcagcccagcagacacacctgtaggcatctcagccctgatcacagcatctgtgtgcttcctcttgcaaatgcccacatgcaaatctgaggatgttggccactcagaagatgtgggtattaacatgtgtgagtcatctgtagatcctgccgcagctggtaccacacaaagatagtcctgtctaaactatgggcacacccacccactctcatgtgtcctatctctacttgggaatgagacataatcatctacttgtgacaacttagagccaagagtgaggagacaatgaagaatataggtgttcattagacagaactgatgctgaggaactgaccagaggtatttcaaatcagctccagggtttccaagatgatataaagacagttccaggatgatattaagaggtggtcaggtaagaactagagaattcaagtcacaattatcacttgagagtttatttatgagccacgagattcagcagtgggttcacagtgccagagttcctggaaagagcatttgagagagccaggcagctgataggtttaagcagtgcctactctgttccatgcagtacagcagtgaaagagccggttcccaggccaggcaaggcaagtgctatagatggagagttgagggacctgccatatcattgcctcaggaatcgggttcaactacggaggcaggtcagagcatgccaaaaaggggaaaggagaagtcagaggctgaggaaacaggtgggagtgagtgctgcagaggcaagacaggcacaaacaacctgttattaaaatgctctacagagttgcaaaggagcgggtggcagatgggaggagggaactcagaaacaatgtcagaaggtacaaaggagaaagggcgatccagaaataagacaagaacaaagctgggctctcttattccaggacagtggtcaacaagccattcctgagtttgcaagtcaggaccacttatgtgccatttcacattaaacttcactttccatgaaatttttctctgccagagaatgtccagtagtaaatctgtctatctataaaagtataaataaattaaacatggcaaagttggttttaaataaggaatgttagactaccgtaactttctggaggttgtcaatgaactatagtactggaactacggatgttcctacttgatcatcaggatataatttggtctgtattcacttttagagatctctgaacttcaaagttcgttcaatttattttcactgatgccttcaaaattcttaaaagttaagttgtgtcaatatttcaactctcacttgaaaaatgaggttattgaggtttcaggacacaaagtaaaacaccaaattcgtgctgtgagtggatttaaacctcagggccagctcccagctattgagccgttccttcagccatagcatgcatcttgcaaagcagctccctggctttcgagagcattgcctgaaccaacatgaagcctagagatgtcaaagttatgtttatgaaagtaaatgatactatgcaatacctcctgtcttcctcagtcatagccaaacagcaaatgaagccaagaggaaatacatgttcctcaatagcagtaaggttccaggtatcaggtggcggcagcagctgctgaaagcctgttccacttcacccctcccctagaaccccaaactcgggcacaaacccacgcctcaaactcttgaggctgcccggattatgagtctttcggcgacagatgacagagtgacgcaacactaccactcccgggggcgctaaaatcatagccttgacggaacaggaaggtggttactcttcacagaagctactaatctgctgcccccaccctgcctcaccacccccaccccccccaaacacacaccggaaagagggaggaggaaaaggaaatgaaagcaagtgactctagggtctggatttcatatgcaagaatagccagcaacaggtgcagcattccggtgaaattaagacactcaaagcaccatttgcctccacagcataaagagcccaggcacagaaacccaacattaggcaatgatgtcagaagtgcaaatcatcatcattctctagccagcagcaattttgtagggaaaaaaataaaagggcatttgtctgttgatacataatttcttttaatttaggagtcctctcttaaaatagtttgaaaataatcttagcatcgatcatcaatgtacttttttaatacctagtgactatcacagtgcctagcacatagtaggtgggtggataaatatttact

SEQ ID NO: 444 - DNA, 4046 bp, Homo sapiens
cagtgttttataaaaacagggttgatcatgactctctgcaagattattttttggtgaagaaatcagagactcactgatggaagaaccaagaaatactaataagggcatgctgaagcacagtgtaaatcaacagtgccctgtcttttaacttccagtaaataagacactgacttgtaaccagagacagagtaggtctgggagccagccgactctgtgggttctgaggcagagccacacacagggagcagccccacaacagtgttcacagtgactatacagaaaagaaactgttaataatggcactccggtagaaaaaatagcaacaatccatgcctcactcttgccacctgcattcatacacacagactctcaggctagcatcaaggctctgaattcaaagatcatatagggttatgtatatatatgtaatcactccaaactttgataagtggcacagattttaacttaatagatttatgggaaatacatggtgatagaatatgataaactcaactctgtaacaagcacatgtatattcctgcacacagaaagaaatgttacttggtacaggccgggcaccgtggctcacacctgtaatcccagcactttgggaggctgaggcaggtagatcacttgaggccaggaggtcaagaccagcctggccaacatgatgaaaccctttctctattgaaatacaaaaattagccaggtgtggtggtgcacgcttgtaatctcagctactggggaggctgaggcacgagaatcacttgaacccagaaggtagaggttgcagtgagctgagatcacaccattgcactccagcctgggtgacagagcaagactctgtcccaaaaacaaacaaacaaaaaaagaagtgacttggtatagaaaaatatataatagtcacagatttgaaatactatagctttggtcactccatttattgtgacaaacagggtgcatatttttctaatctgtagcttagagcacagtattattaatatactgtactattaactatgatttattcatttctataaaccaagtaataaagttagaccatttttactttggtaaattcttcagttctctagaagtgaaatcttggtaaaagaatttaaccacaggcacctatagcaattttatacataattctttaatttgcaaattaccagtagtaactaaactatttttttctaagcaataaaaagtaaagaacataatgctataaatgtttaggatacaataatcattctagaaaaattctagaaatctttctagaaaaattcaaatcagaatgacactgggaagcctgggcatggtagctcacacctataatcccagcactttgggaggccgaggagggcggattgcttgagtccaggagttcaagatcagcctgggcaacatagtgaggcctctgtctctacaaaaaactttttttttttttttgagacagagtgtcgctctgtcaccaggctggagtgcagtggcatgatctcagttcactgcaactcacgcctcccgagttcaagcgattctcctgcctcagcctcctgagtagctgggattacaggcacacgccaccacacccagctaattgttatatttttagtagacaccaggtttcaccatgttggccaggctggtatcgaactcctgacctcgtgatctacccacctcggcctcccaaagtgctgggattacaggcgtgagccacccggcccgacccaaaaaacttttttaaaaaaagcaactgggaatagtggtgcacacctgtagtcccagctacttgggaggatgaggtgggaggactgcctgagtcccagagttcaagactgcaggaagctgtgatcgtgccactgcattcagcctgggtgacagagtgaaaccctgtctcaaaaaaaagaaaagaaaaatgacagtgggtatcaaaaacccattacaacttataaaaaggctgctaccctatgtgggggggaagaaaacatgccataaaacgccaggcagaacgtgctgattgacagagaccaggctgtgcactagaccagaagagtggtgccctgaaacaaagaggtggagctaggaagcaaggactccaacatctaaggccttcaatggatacattccaaccagcaagcaacacccaggcagccgcctggcagggcaaggctagattccaccaacgaggtgaatcccccctaaaaatgaatcagagtcacagctttatcaaaggtcaaagtgaaacactgagaatcagtagccaggcaaaagcaaacaagggtacagatatatagcaatcaaagacaactcaaacaaggccacatatccaaacaaagagcctggaaaacaaaaagtcaccatgacacccaaccaccaggaaactgtgaaatgatcttgagattgataataatgaaattagaacaccctttaagcttaaggaaagaaatccagaaatgaaaggtatagcccagatcacttttagatctgtgctagatagctaatatgcatttccctagccataatcaaatattctaacatgcttataaacgctgagttattaatgtttacacacttgcataaatatcatttagctcttataaccataaaatgccccccagtctcatctgttaatagttctaaaaggatcacagcgcttaggatatggctgacgcatttagcaaacataatccaaatgttaattctagataaccaactaaagaatagagtccatctgggacatgtattttacgtaaaatattttcaaaaaacattcaagtgtgatgatgttagcatagtgcactactagaagtctcatactatgtagctactgcccaaaagaagtaaaaactccttgtttaactatgggagaaaacatggaaaggatagttcatcaagattgaggaattccagtattttttaagtatttccttttagttactttttttttttttttttttgagatggagtctcactctgtcacccaggctggagtgcagaggcacaatctcagctcactgcaacctccgcctcccaggttcaagtgattctcctgcctcagtcacccaagtacctgggattacaggcgcaggccaccacacccagttaatttttgtatttttaaggctgggcgcggtagctcacaactgtaatcccagcactttgggaggcaggggcgggcggatcccgaggtcaggagattaagaccagcctgaccaacatggtgaaacctcatctctactaaaaatacaaaaattagctgggtgtggtggcacgtgcctgcagtcccagctactctgggagctgaggcaagagaatcacttgagcccgggaggcggaggttgcaatgagccgagatcacgccactgcactccagcctggtgacagagtgagactccacctaaaaaaaaaaaaaattgtgtttttagtagagatggggtttcaccatattggccaggctggtctcaaactcctgacctcaagttatccgcccgccttggcctcccaaagtgctgggattacaggagtgagccaccgtgcagggcatcttttagttacattttaacatccatgctctttttgtctctactgattcattttttaattttgttttgttatacatatttttgtaagccactgaacctagaacaaagtatggagttattaacaaatgtaaaatatttaccttattccatgaactaaactaaaattattcaaccaaaaataaaaaactaaaagaagattgaggcattccatagcgttatcctattcttggtttctttgctttctctccatcacgggagttgagagtacccaattatataaatcaaataaaagaaagtaagaagaaaaatctataaatgccatatgatctgccaagaagtactttattttatagtaagaagatgcagtgtaagcaaatggataacacatacacccacggtaattcaaaggctctccatcccaggacctgttcacaaatgcagacctttgaaaatattctgcaagcactgagtggctaatatttgtgtaatttgaagaaaaga

SEQ ID NO: 445 - DNA, 4062 bp, Homo sapiens
gtaaccattaagactagaagtagtatataatgtttcccaaagagtagaagaagaaaagggggtaaagggaaacctaccgatacaaaaagagataagaaagtaaaaaaaaaaaaaaccacagaaaaaataagaaaaatgagcagctcacactatgcggtaaaaatgaacctaaatatataaataatcataatcaatgttaatggactaaattcttcaattaaaagatcaagattagcagaacacaaaatctagctctaatctgttctcaggatattcctaaaacaaaagccttggaagagtttccctccaatcccctgcttccatgctactactatattgtctaggactgtatttcatttctatcttgattttcttttaatctcacaaattggacattattgttgctttgacttatccaaaagttaatcattttctttattctgtgtctgttcttgcatgttagacccacccaccttctgggatgcacttcccccacttccctccctgaattcatctcccattactccccccactcaggtcactgcagccactgccctctccgatgccaagtgcctcctctgctcttgtctgatgtattttccttcagtgtgtgtacatttctatatactacacaactttattattgtcttgtctccctctgttggaacataagctccacgagaactaagatttttgcctgttttgttctctgctgtataccctgtgtctagcacataaaaggcaccccacacgtatttgttgaatcaattaattaataaatggaatggtatattggctaaaattctacagtttcttgataaaatcccttaaccaactaaaaacctagggcaacctcctttaacctcataaaaagtgtaccaaaaaagctacaaaaactatcattcttatggtaaaacactaaaagcactccttttattatcaacaacaaaaattctgcccactatcaccaattcaaatcaacattgcattgaaggacaaggcacaatagagaacaaaaaagaaaacagaagaaataaaaggatcataattctaggacattctaatccctcctcctccaagaaacctacaatctagagacaaacttactaaaatttgtaagaactgattaagtttccagatataagacgtagaaaagtctattgcacttttatataccagcaaaaaaacatagaggaagtgaaatttgagaaaagtaatcatttacaacaataaaatataacaaattttgcctttggcatttaaatccctgatccatgtagaaattattattttttttttagtgtggtgaagtaaagatccaatacatttatttatatatgggtaatcaattgtccaaatcatctattaatctgcaatgtcagctcaagcgtatatcagattttcctgtgtaatggagcaatttctgagttcttaattttattaggttgaaccatatgaaaacaccattcttatatagcaaaaacactcacatgtcggcaatttcatatggttcagcttatattggtgtgtatattgatagtactgcatagtcttaattaatatagcttcatagttttggtttctttttggaaagtatttcagcctgattcttcctcagaagtctactggctattcttgggcctcgtcttttatataattagaatctgttcacaagtttcattaaagacaatttggctatttttaattgggaatgcattgaatttacagagttttactttcagtttgagaagaaaagctaacacaattttttgtatacattatcagttagtgctgaatgagtggggttgaactttgtgaattatttcatattttttaaattcataaatatgcaggagaaactatggaccttgtattgcagcatttaagtcctaaggaaataaaaacctgatgggtagttttcttccatgatatttcttttcttaaggttttggtagaacatgtgcagaaaggagagcagtggcactggagaaggggcttcagggagtagtggtggcagcaaagggacagagaggagacatgaatttgtaaagcccacttctagatagagtaatgtctcacttatgtcggtggaggacagcattaaaggcgagtccatctgtccagctggtggtgaagttgaggacgttgacttggctgtagggcctggtggtctgacgcacccagctgagcaggatcttctcactgttcgtctgctgcaggtccgacatgacatccttcatgacatctttcacctatgtaagagaaaccaggcctgtccataactaatacttcagtaatttacttcaacttacttcaatgaagtccttgaaaaagcaatattgcactaattaaccattatggatcaggtaactggcattcattttacttcagatttttctgtagacactagagcaatacattttaacagtgattattttgggggactagaatttgaggtgatttttacctcacttttatacattactgtgttttctatatcttaagcaatacttgtactatgtttggttacaatgaacataactttcacagtcatagaaagtcatatttaactctatgtgtttacaaagaccttttcaattaaattttattttctacaaaaatgagaaaggaaaaacttttgagtgactacaaaataaagtatctttcctgactgcaatcacgattatactctagaactaacattttatagtattattctaaattagtaaatatgttttaagaaagtgctcaaagaatgacatagatctatctaagggacacaggagccaatttaaggggctcacactggccaaatctaggatgacttgaacactgaaatgagtactagtaaaagatcataaacctatgcaaatgtccatgaatctatactgatacataaatgaataaatgaatggagagagagataagatagagaaacaagaaacaaggggaagctcttctttacaagtagaacaccaactaatgtagaaggattaatgaaattagaaaatcattatctatcaagcatcataataatagctggtccaggcaaaaattatgaacgggtgctaaaagtttgataaaaactaaatatttatacagtctcaaagtatatccccacccgatacttttaataacaaagggtagtcaatttacagggaagaaacttggtaaataccaccttagccaaacaatcaaagttaacactgccagaaaaagaacagatatcacctatccccgatatgatgcactaagaagaactcacgtcacttttgtgacgtccctgccaaaagtgaacaacctgaacttaatcataaggaaagctcagccaagcccaagcccactgagagagacattctacaaaataactagccagcactcttcaaaaatatcaatatcatgaaatacaaagactcaaaaacttccagattaaagaggactaaagagacatgaaaaataaatgtaatgcatgatctcagattttcttttgctactaaggatattattgggacaactgacaaaatcttaagatctgtagattacataattgtattatttcaatgttattttcttgattttaataattatatactaagttttcatatttaataatcaataattggcattttaaatatcaatattttacatctcatattattataccaatatgctattgtgtttacataagagagttcttgtttttaggagaatgccatggcgttagaaaatacacactaaatattttaggcagactgagagagagtacaaatgaaatatagacaactggtaacatttaggaaatgtgagtgaaaggtacttgggaattctttgaactattcctgcaacttttctagatgtgaaattatgtccctttttaaaatttaacataagaaaggtaggtacttttttccctatgccaggaaaatagggcattttgtcagcctcttccattgaaaattgttatgagttgaattatgttctctaaaattaatatgttgaagtcctaaccctcagtacttcagagaggggctctatttggaaataaggtcattgcagatgtca

SEQ ID NO: 446 - DNA, 4046 bp, Homo sapiens
aagagatcaggtctgaaaaccatgcaaataaaatgcaatgaagatgaaatatgtggaaacaaagtaggcattgttataatctaatacattttagttttagattatttttatttgtgaggtttttttgagtttatttttatatcccaaaggcttgtcaaatacatacttgaaattaattcacaaatatgaaaataacagataatactttccaagggtcttgtattagctaaataggactgctattttctgtggtaaccattaagactagaagtagtatataatgtttcccaaagagtagaagaagaaaagggggtaaagggaaacctaccgatacaaaaagagataagaaagtaaaaaaaaaaaaaaccacagaaaaaataagaaaaatgagcagctcacactatgcggtaaaaatgaacctaaatatataaataatcataatcaatgttaatggactaaattcttcaattaaaagatcaagattagcagaacacaaaatctagctctaatctgttctcaggatattcctaaaacaaaagccttggaagagtttccctccaatcccctgcttccatgctactactatattgtctaggactgtatttcatttctatcttgattttcttttaatctcacaaattggacattattgttgctttgacttatccaaaagttaatcattttctttattctgtgtctgttcttgcatgttagacccacccaccttctgggatgcacttcccccacttccctccctgaattcatctcccattactccccccactcaggtcactgcagccactgccctctccgatgccaagtgcctcctctgctcttgtctgatgtattttccttcagtgtgtgtacatttctatatactacacaactttattattgtcttgtctccctctgttggaacataagctccacgagaactaagatttttgcctgttttgttctctgctgtataccctgtgtctagcacataaaaggcaccccacacgtatttgttgaatcaattaattaataaatggaatggtatattggctaaaattctacagtttcttgataaaatcccttaaccaactaaaaacctagggcaacctcctttaacctcataaaaagtgtaccaaaaaagctacaaaaactatcattcttatggtaaaacactaaaagcactccttttattatcaacaacaaaaattctgcccactatcaccaattcaaatcaacattgcattgaaggacaaggcacaatagagaacaaaaaagaaaacagaagaaataaaaggatcataattctaggacattctaatccctcctcctccaagaaacctacaatctagagacaaacttactaaaatttgtaagaactgattaagtttccagatataagacgtagaaaagtctattgcacttttatataccagcaaaaaaacatagaggaagtgaaatttgagaaaagtaatcatttacaacaataaaatataacaaattttgcctttggcatttaaatccctgatccatgtagaaattattattttttttttagtgtggtgaagtaaagatccaatacatttatttatatatgggtaatcaattgtccaaatcatctattaatctgcaatgtcagctcaagcgtatatcagattttcctgtgtaatggagcaatttctgagttcttaattttattaggttgaaccatatgaaaacaccattcttatatagcaaaaacactcacatgtcggcaatttcatatggttcagcttatattggtgtgtatattgatagtactgcatagtcttaattaatatagcttcatagttttggtttctttttggaaagtatttcagcctgattcttcctcagaagtctactggctattcttgggcctcgtcttttatataattagaatctgttcacaagtttcattaaagacaatttggctatttttaattgggaatgcattgaatttacagagttttactttcagtttgagaagaaaagctaacacaattttttgtatacattatcagttagtgctgaatgagtggggttgaactttgtgaattatttcatattttttaaattcataaatatgcaggagaaactatggaccttgtattgcagcatttaagtcctaaggaaataaaaacctgatgggtagttttcttccatgatatttcttttcttaaggttttggtagaacatgtgcagaaaggagagcagtggcactggagaaggggcttcagggagtagtggtggcagcaaagggacagagaggagacatgaatttgtaaagcccacttctagatagagtaatgtctcacttatgtcggtggaggacagcattaaaggcgagtccatctgtccagctggtggtgaagttgaggacgttgacttggctgtagggcctggtggtctgacgcacccagctgagcaggatcttctcactgttcgtctgctgcaggtccgacatgacatccttcatgacatctttcacctatgtaagagaaaccaggcctgtccataactaatacttcagtaatttacttcaacttacttcaatgaagtccttgaaaaagcaatattgcactaattaaccattatggatcaggtaactggcattcattttacttcagatttttctgtagacactagagcaatacattttaacagtgattattttgggggactagaatttgaggtgatttttacctcacttttatacattactgtgttttctatatcttaagcaatacttgtactatgtttggttacaatgaacataactttcacagtcatagaaagtcatatttaactctatgtgtttacaaagaccttttcaattaaattttattttctacaaaaatgagaaaggaaaaacttttgagtgactacaaaataaagtatctttcctgactgcaatcacgattatactctagaactaacattttatagtattattctaaattagtaaatatgttttaagaaagtgctcaaagaatgacatagatctatctaagggacacaggagccaatttaaggggctcacactggccaaatctaggatgacttgaacactgaaatgagtactagtaaaagatcataaacctatgcaaatgtccatgaatctatactgatacataaatgaataaatgaatggagagagagataagatagagaaacaagaaacaaggggaagctcttctttacaagtagaacaccaactaatgtagaaggattaatgaaattagaaaatcattatctatcaagcatcataataatagctggtccaggcaaaaattatgaacgggtgctaaaagtttgataaaaactaaatatttatacagtctcaaagtatatccccacccgatacttttaataacaaagggtagtcaatttacagggaagaaacttggtaaataccaccttagccaaacaatcaaagttaacactgccagaaaaagaacagatatcacctatccccgatatgatgcactaagaagaactcacgtcacttttgtgacgtccctgccaaaagtgaacaacctgaacttaatcataaggaaagctcagccaagcccaagcccactgagagagacattctacaaaataactagccagcactcttcaaaaatatcaatatcatgaaatacaaagactcaaaaacttccagattaaagaggactaaagagacatgaaaaataaatgtaatgcatgatctcagattttcttttgctactaaggatattattgggacaactgacaaaatcttaagatctgtagattacataattgtattatttcaatgttattttcttgattttaataattatatactaagttttcatatttaataatcaataattggcattttaaatatcaatattttacatctcatattattataccaatatgctattgtgtttacataagagagttcttgtttttaggagaatgccatggcgttagaaaatacacactaaatattttaggcagactgagagagagtacaaatgaaatatagacaactggtaacattt

SEQ ID NO: 447 - DNA, 4047 bp, Homo sapiens
tgtcattatgcacaaggaagctggggactgcaaccagccccatccattcaccccaagagctgaagtaaaggaatcaatacctgggtactcctgtagcccacacactgtagaaccccaactgagaagtacaatcaaaggtaggtttttctacccttctggataaagaatgagaaaggacatgaagaacaagggcaatatgtaattgggtctcagaccacaggtccctcaggattatccaactttacagcactcttacctgtaactggtcttctaggatagctgtagcactctcaccactgttttcatcaacaatgaccaccatgtgagttagtgaatttactttcacctgttcagcctcaagatcactttgcaaactctagagaaaaaaattaagataaaccattatttctactttcacatttacctatttaaaacgcactcagttgtcaatagtaattaaggacagttaatgaggcatcatatttaaatttccaatcattaccctaactgttctactaatgaaactaatcctattatacatctttacattccattatcaacaaaggcagtttgaggatgcagtgttataacagactgcaaatggagatatcaccacttttattcaagttctggccctccctcagaatttatagcataaaggagttgagtgtccatactaggaattaatacaaaaatgtagaagtggtaaagcaaaaaagtccagagcttaaataaaccaagtcagagatcattttatctagtgtaggacagtataaagagataagtagaatgctacacgatagtcaaaagttactctgattagctacccaataaagcagttaaagaagtatggacaccttagattctctcgccttttccatgggaagagcatagtcattggatacatgtgtatagaaaatttataggctgggcatggtggctcacacctgtaatcccagcactttgggaacccaaggcaggcggatcacttgaggtcaggagttcaagaccagcctggccaacatggtgaaaccctgactttactaaaaatacaaaaaatacaaaaaattagctgggtgtggtggcacacgcctgtagtcccagctacttgggagactgaggtgggagaatcacttgaacccaggaggcagagggtgcagtgagctgagattttgccattgccctccagcctgggtgacagagcaagactccatctcaaaaaaaagaaagaaagaaagaaaatttatttaaatactatcaatagtgttctcaaatgcttctcagagttgtgtttaatgtattcctaaagttttacatattagttacctcaatgtttcactgatcaataaaagtcttcaatttacagagagcatattttattctatctttccttatcttgactatgaaaagtttatctcctagacttgtgaccaaattaaattgcccacccaattttggttcctaacttaatgcctgacgctttcctgaatcatagacgaagaatttgctcttcacccacacaccatgtgaacgccaacatgcttgggttcttagccacttagagggccaaaagaacccttctccagttgtatgaaagctatgtactttcaaaagaaaactgcacatcacatataaaattttaccgtgcccttttatccctggctcagaaaagtctcatctctatcaattccaccctgtgagctgctaaatgaagacaaccctgaagaagtgtcccaacttcatgttaacgatagatgtcatcagcctctgagatgctaagtgctgctctttcatatttgataaggtatcgaagaaatatgagacagatttactttatgttcttctagcagcttttgtagagattttacatcatcatccagggggcaagtttccatcttctgaatgcgctcctctgtgagtgttaaccaggcggagagctgctgcagttgcttcttctgcagttccatcagcacatcgtgcagcctgtccgtggggaacacagcattattcctacaagccttttccctttgcaaagtcaaatatacattctgggcaccggagatacagggcaagggaagacacccttgtctaaacattcaaggtagcatttagtctttaaatatagaagccaggaaagtaaacttttattttgtcctaaatggagttcattaaatgcagacaaagaatgcaaaaagcagcaccctgtattcatatcagaatcattgtttcttcaatcaggaattcctgcttattaaataggtggaagtggcaatgaatgcagtttgctccttaagacacaatacatgaaataaaataaaccatgagaaagctttaaaataaaagtcacaaaatggaaaagtagatcaatactccatagtcctgtcttcacaccaagttaatgtttagctaatcttaacattgcaaataagtaactgcccctatgaaatgtcttttcctttttttggagacagtctcactttgttacccaggctggagtgcagtggctgaatctcagctcactgcaatctctgtctcctgagttcaagcgatcctcatacctcaacctcccaagtagctaggattacaggcatggcccaccatgcccagctaatttttgtatttttagtagagacggagtttcgccatgtcgcccaggctggtctcaaactcctggcctcaagtgatccatccgcgttggcctcccaagtgctgggattacaggcatgagccaccatgcctatcctctttttcctttttgttaaattctgtattccaacttttatcttttggtgtggctaacacatcaaaggggaaacaaagatcatgcagaattccagcaatattacccgtagaaaagagtcttacttttccaaggcaagttctgtaatcatctcgctttcacagacatgcagacatctactagagctcaactgtgcaaagcagcctgtggaattaagtgcatttcttggctttccactcaccgggactgtctgtccatactctccaccctaagagcctcccatctagcattcagcagggtcatctgttcctgaatctcaaattcttcttcgtctgacagagttccttgtgttatcagttggttgcctgcctgcaggacgctgcccacactgctctggtgtgcagtcagttccatcataaaagcctagaaagggacattgttataatttgtgagctactcagtgcaaaaaaaaaaaaggaagactgaacaaattgctaatgcctaacctaaatgtcagtgatgcagaaaaaggtagcctagtagagcgcaaataaaatagacattgaccacattttttaatctctgaaaataggaataaacacctgccataagttaaaagagaaatagctcaaagcaagcaatgatgcatctgataataccagctattttaaagtaaatgctgactatgctactcatagatcatgaacatggaattctaaataaataaaataaaaggctgggtgtggtggctcacacctataatcccagcattttgggaggctgaggcaggtggatcacctaggccaggagttcaagaccagcctggacaacaaggtgaaaccccgtctctaactaaaaacacaaaaaattagccgggcgtggtggcacatgtttgcagtcccagctacttgggaggctgatgcaggagaatcacttgaagccaggaggtagaagttgcagtgagccaagattgtgccactgcactccagcctgggtgacagagtaagactctgttaaaaaaaaaaaaattataaatatatatatatacacacacatatacatatacatatataatatataaatagattatatataaaaatatttatatattttatttatatatatttatttatatattttatttatatataaaataaaatatatatttatttttatttatatatatttatatataaatatatatttatttattatatatataaatatatatataaaataaaataccatactcacccaagaggaactgtttaagagatattaccacttatattattttctatccaaaa

SEQ ID NO: 448 - DNA, 4074 bp, Homo sapiens
tcccctgcactttctgacaataaaaactggggaagctatattcaaagactgaggaggtcactgtcgagttgtgacagtgaaagaaagaataaaaagacagtcatggacaatcatatccttccaaggagaataatgggaaaggaagaaagaaagcttcgatcacaaagttctcccaattgaacacaggataaataaaatcatccaagaaaatttggatgcttagctagtgccaagtagaatattcagaagacaggggcagtgagtggttcagtagttgacttttcataataataatacttattatgtctagatttgcctatgattaatgattagtacaaaataggcaccaagtagaaaatatagtatgtgcaatattggatttgaacaatttctctatctcttctcactttttcttagcttcaatatccacatggatctgtctcttctttgggggaggaggaggaggcagttcctgcttagatttttttgtaattgcttgttctcttacacgaacagtctccaaaaggtccttctgaggaatctgagacatccccagctttgctacagcctgagtcacctgaaataaaagccatccaaaatttcaatgtttataacagcttcattgagatgtaattcacatgctataaaattctttctttgaaatacacaatttaatggttattagcacatttatacagttgtataatcatcctcacagtctgtctccagaacattttatcaccccaaaaagaaatcccatagccataaaccaacactccccattccccactcccaccagtggcaaccatgcatttactttctatctctgtggattttccccttgtggacatttcctatgaatggaatcatagcgtatataatcttgcgattggcttcttatacttagcatagtgttttcaaggttcatctatgttgtagcatgtgtcaatacttcgttcttttgtattatcagataatattgtatgcatacaccacattttgtttatccattcatctgtgtatggatatttgagttgttccactttttggctattataaataatgctgctaagaatatctgtctacaaaccaatgttttatgtttgactaattcattaaaatatttttaagattaataagattacttaagatttaagatgttaagattatttattggctaagtataatcagttactataaattaaattataggatattaagataatctattaaaacttactttagaaaactgaaggtgattttcacatgtcaatttttcatcaggtgtaaggaaacaactttttagtttatttcatacaaattaaaactaacctgaacatttaaattttaaatgtttacttcatggcacaacatatgatccaaatcaaaaagtacctggttggaggaatcttctagtctctgaaccaaagaatcccatctttgagtcagttcctctgagtcactgttgatcttcttagatgccttggaattatcaagtaattgtcccacatcctggccaatctcactcagctgatccaatgtttgacgcttcatttccatgtcttccttcaaaatctagtatttcagatatttattagatgactctttttaacaggactttgtctttctgttccccagccaaaaattttaaacatgtatcttttatagtaaaatgtacatgctttgcagttcactatgctaaaaggtaagactcgtggttccagattgttacagggcagcagtctaatgctaggtaatgagctgtaatctgcattcactaaattctactaaccattagctataaaacattaagatatcataggcttacaacacagatgctgacaaccccatcacttacagccagacgtcgaacactgacacttagttccttttggtctttgaagttgcttgtctggactttatttaaagcctcttctttttcggttaaccaagctttcaacaagcactacaagtaataacaaaagttgaactttatctgcaaaatcatttggtaattcaattaaatcatgcatccaaatttctaacttttattttattagaggcttcacccttacatggggataagaaggccttcaaacacctaagtctgaggcacaaatgacccagaaagatacctttctttaaaatattatccttctcagatttgtaacagaacaatcagacattagcctcatacctagggaactaaacctaattctcaaggagataggtggagggaaaagggaaaatccaactatgcaagtctccaaaggaattacattacaacttcctagaggcagaagtaagctcggagattgtcttgtcccagcccctcattttagaaaggaaggaaagagaagtcaagttacatgtcccagatcacttggatagttaatggcagagctgggtccagggtccacaccccaaaaccagtgttttccatggcatcatgtaggaaatccacactagcattcaaggttcaacagcaattatgattaaaggagggagtctgaagagcacccaaagcccatataaagatttttcaacttcattggacaacaatgtgtgttttctaagcagaggatattcagtcatgtagagagataatcctgaagaagggatggaaaacaaccgtagctacattgtgataatttctcccaaaatgtagcatttagggtggaaacccttttctatttagtagggaggaaaacaacttggttctgtatttgcaacggaatcaattctttctcagcaattttatttatgaattaaatatttaacaactattccttgcctctatatttcaccccccaatggatactgtcctcagtctagtgaggctggtaagatatgcacataaataatgatgccatcagacagaacatgtagacagtacacacacacacacaaaaggtatagttaaaatgtcagatcattatagaacacgatgaaaggtcagtttaaaacctaaagtggtacaagtgactgaaatactagcactctatttttaaactgttttttatcatcaaattaaaattatttccaaatttgcaattactttactggatagaagagtaacacaatggttttctctagcaatcgatgtcttctactgcaattattactattactattatttttattttttgagacagagtctcactctgtcacccagactggagtgcagtggtgccatctcggatcactgcaacctctgcttcctgggttcaagcaattctcctgcctccatagcctcctgagtggctgggattacaggtgcccactgcaggcctggctaattttttgcatttttagtagagacaggtttcaacatgttggtctgacctcaagtgatctgcccgcctcggcctcccaaagtgctgggattacaagcgtgatccaccgcgcccagcctttctactgtcattattgaagtaaaattttaactattctgagactttttggcctaaatacaaggttcacaataaacataaatatttataaagtgaaatgtaaatatttgtaacatgaaatgtaaacatttcataaatcagaatcaggtcccttttgtgattcctaataagaaaaatctgaccacagattgagggcggggggggaagtagtcattaacaatttatatttggacaaattctgcaactatctgccaccatatttagtaagccacaaaacatcacacacttgagttttttcccctgaagagaatatagttgcttcttatagatggaaatgaaatgcatttaaaagaatcaaaatggacactgagagatgtgggaatagagtatttgcttttttttttttttttttgagagggagtctcgctcttgtctcccaggctggagtgcagtggcacagtctcggctcactgcaacctctgcctcctgggttccagcaattctcctgcctcagcctcctgagtagctgggattacaggcacccaccgccacacctggcttatttttatatttttagtggagacggggtttcactatgttggccgggctagtcttgaactcctgacttcaagtgatccacctgcctcagcctcccaaagtg

SEQ ID NO: 449 - DNA, 4046 bp, Homo sapiens
atgatgaaatgtctctctgaagatggaacaacaatgtcccttttgttccatataatctcctcttccttaacagctacacaaagaataaaagaaaacaaagatcccttcaaccagtcttgctgtaagctccaccgtgtagacaaacccaggtccagagtggaggagattatatggaaatactgccaccatgctgcccaggtaccctgagaaataatgactgaacagccagctggaacagtgtctacctcagtcactaatgtaaaaatatcacagaagtaacacttgcgtggaaaggaagtgagttctcttgaagcacaaagaggtgaaaccaactagcagcaaaagttaaactgcctactgatccttgtcaaaagtgaaagcacagcttgtaccaataagtggagaaagaggtaccctcaaagacatatttcacataactgaattcaaggaacaaagacatgctgtccagatgcactttcagaagaaaggcaatacgacacatttgcctagcatgcacacatacagacacttccagtcatcacacaatctacaattgctgaagttaggctgggttacatgtggagcatttcacacaatgctcaatgcatttcacaaaataatgcacaatgcaacacagttcctaactcaaatggcagctaggaagtaaatagtgtaacgtaggagggatgagctttcaaaatctttaacagtgaaccttccaaaaccaagtgtattccaaaagtaagaactctaaaatttttctgaatctgacagtggaatatgatttcttttaaaagacagtatgagactgccaaaactttaactattttgaggaaacagaagtaagggatcattcattttgatcctcctagcaatgatattaagtggcctcctcaaccaaaggaagaaattgcacctgtttctcaaaaaaaaaaaaaaaaaaaatctttaaaaatcattatatccaggtcaggtacaatggctgacacctgttatccctggtattttgggaggctaacatctgttattttgcctaacacctgttattttgggaggctgttatatcacctgttataatggcttacacctgttattttgggaggctgaggtgggaagatcacttgagcccaggagttctagaccagcgtgggcaacatagctagaccctggctctactaaaaataaaaaaccagccaggcatggtggtgcatgcctgtagtcccagctactcagtaggctgaggcagaaggaccactgaaacccaggaggtcaagactgcagctatgattgcaccactgctctccagcctgggtgacagagtgagatcctgtagctacaaaaaaaaaaattattattatatcctactgacacaattttagagaatgtgaaacttgcttgtatgtttacaaaaaggtgtgaatctggaaaagaatctgaatacagaagactttaagactttgaacaatacaggcacaaaggaaaatggagaaggttggtgcaaagcaagcaagtgtactcaagttctaaatgttgggagtcatgtttacattaaggcaaactgagacaggagattttaaaattgttgggtttaccattctctagatgttgttgacgatcctctacagcctcttgtacagcttggtagcggcccagaaagctatcgaagccccgctggacaaaatctggggcagaaggctgagacatcagggccgagcagcttgcacgagccatttcaattttggggtgaaggccaagaagatttgtcaattcccgctaaggaagagaaaatacggtcacacaactcactgaagatgaacatcctcacaggaagttaatcagggcagcattaacttaaagttcatgatacgagaagccctccttaactctggaactgcacatagaattcctccactttccagaccgttggctccttacctgacaggaatccttcaagcttggcaaggactgccgggaagattcagaaatggaagtgtgttttacccactcctcctttgtcttgatgaccttttcaagctcatcaagctgcttgaaataagcatttatatcttcctgtagctgaatctttctttctagatcttccaaatgttgagatacattcttccattctgatgaaaccttctccagaacattttttatttcttcagtaggaaggccttctatgcagacatgaaaaacaagcaaacagtctatatattacaaaatgtgtcttgaatttattctgaacattctaacactcagaatagtgaggcaatgtcacacataatgatcactttcttaagtcccttttaatacaacaacaaaaatttataatgatgcacttaaaaataatgatgtttatttcaattccttgaacaaagaagaaagacattttaaaataacgattcaggcacatcagtagaacttcagccactgccttttctagataatatatgtttccatccatgccatgcttctactctgctagtttatcacctgaaccagtgaaataagatcaactaccttgatctgtctaggcccgacttcagaaagaagaccctttgtcctaagaaaaaaagaaagctggctagaaaaactaggaggcagctcaggtcttggtgaccaaagcacagtgtcatataaattaaaaaatgaatggcgaggatgccttatgctgggaagcaacctggtgagtgcaggaatattaagccagcagccaggctctagaagcatcagcaagcccactggagaccttgcacataaataagcaaataccaaaagactgaggcagcaataagatgatctactttagaaacacatcagggaaaacaatgccaccatttttattactgaaatcttatcattttatttgtccgatatttttgaaaagtagagaatgttcctaaaaataataaagtcatatataataataggttttatcatagtccttcccttaatctaaaataccttcaaatcctctaaaatgactatgaaaaagtatgggaaatcttcaaaggaatctttctattcggaggaaaacatgcataccaaaaggatggcttcacatttttattgagtaggaaagcaataaaacaatcctgctttataaacatatatgatcaaaatccaggataatgagagcttgaactaaaaaacaaaggcataaaaacaaaaagtcatgtatgatccacagacaatgcaactttgaaaatttttataatacactgtgtctactgaaaatcataaatgagggcatatcatgctgtcatttgaatgtgtcacctatgtcaattgcagaagttcactgttcaccaccatctctcaggtaagagaatatgagacataagcaaagcattcacaccacaagccatgctgcattacccctgttaatggggagagtatacaaaacaaatcaccattttcctaacaatatgaacaatggagatatgggtcatgcccctgccccatcatttctattctaggcaggcaaaggaatagtaacaccagccacatcatctttatgttggacaattcatactaatcaaggaagaaaattaagtaggtaaataaaatttctgagatggaaaattaccactactcatctagaaaactggaaagaggtgctcacttcaagaacaagggcggttaaaacaacttcagttattttttcactgacaatgtcttacaagccattcattttgcctctttaaaccaattttaaacatctgaatctccctttctctaatcctgagatattgctggttacagtgatgcccggtaatgattcaaacacaatttacatcttataaaaggaaaactgcacattgtctttaaaaatagttgttttactcccagagatccagagtttaaaattttctatttctataaaacacagagttcttagaaggtgactagtcaaaaggcaaaatcaacagaagatcactttattaattgtctaaaagggagaacatagaacacattcctgccactcagtctcacttgactttacacttctcagtctatcactattggaatcaagggaaacgttt

SEQ ID NO: 450 - DNA, 4049 bp, Homo sapiens
agagatatatccaaatctaaatctcctattgctaatttcatttcattcgttgaaaaatattgattggatgccttctctgtgccaggcattgctctagttatgagtacatcttggcatacatcggtgaataagaaatttaaaaaagacaaagatccctgactgatggggaaaaaaaaaaaaaaagaccaaggtaaggagtcactggaggataggaagccttgcagggagagagtgtgattggttcattctccacccagaactttcctattaaaataccaggtgacctggaaactctgcttctccatctttctcacaggcagaatgttaaaatctgacactgacttctattgacattgactctctccttatacatcctcacatttatcctttcctcttaaactttatcactgctgcatctgtcaacattttcaggtgtagtgaaggatcctgtttctgaattttcatgtccctggaacgatttgccttcccactctgacactgtcaatggcctatctctgacttttgacttcaaatgtcaaaaacctgcaaaaagtagtttcatgtattcagcaatttactactacctgggctatttctaccaccccaaccaagttactactataatctaatcaacagtctgtatttcacacaggccctccatgcctgaaacattattttgaccatttttaagcaattttctcttatcttcaaggtccagtttactctacttttgactttgcttccaggcaaaaggaaataaatgtgctctctagcacattaaaagtacatctttgataagtcccaacttaaatacataataaatggggatctagaaagaatgtaaaatatttaaataataaatacgtgaatcttataagataattactatttaccccgtaataaacttaaactcccagtggcctctggatttacctcaaaagctctgagtgtgagagcaatttcctcaagcaaatgtagatctttggaaaccaagacctttagcttgttccactttccttgcacatcatcaaattcttgcttatataatttttctacatcaggatgaacatttttctccagagcctttgtttcttctgcaagtttatgtaatgcaggtttctgattctcaaggatttcatcaagggtctggaaaaagttttaaaagattaaaaatatgcacaaaaatgtgtctgcacagatatagtaaaatgggctatataaagtcaaaagtcactttaaaatgcattagaaagcatttttatctaaaaagaacagtgggtgggagtgtgaattagttcaaccactgtggaagacagtgtggtgattcctcaaagacctaaaaccagaaatgccatttgacccagcaatctcactgggtatatacccaaaggaatacaaatcattctgttataaagatatatgcacactatgttcattgcagcacaattcacaatagcaaggacaaggaatcaacccaaatgcccatcaatgatagactacttaaagaaaatgtggtacatatcaaccatggaatactatgcagccataaaaaggaacaagatcatgtcctttgcaggtatatggatggagctggaagccattatcctcggcaaactaattcagaaacaacaaaaaaaaataccgcatattctcacttataagtgggagctgaataatgagaacatacggacacatggtggggaaaaacacacactggggtctgttggagggtggggcatggtgggagggaaagcatcaggaagaagagctaatggatgctgggcttaatacgtagtgcagcaaactaccatgacacacgtttacccatttaacaaacctgcacatcctgcacaagtacccctgaacttaaaataaaagttggaaatcaaaaaacaaaacaaaacaaaacatgaaaaactcatgaaaaaaataggcataatcataaaaattaaagctttttcttcatgagttgtgtgtgggcaatacagtgtattctcaaccctaaaaaccaagggaacagcaaacccagtgtgggccaagtgtgcagtgctcaatggctgctctccttttcatctaatagcacagagccataaggctactcaactaaatgacctcggaaacattcctattcgatgcagaaaaaagtatacatcaacacgtcaactgatagtcctcatttcataaagatattttagcagattttatgaacaggttgagaattttaagctaatcacagcagaaggagaaaatatgcttttcttctatgaaaaaatttttaataactgtactttcttttatgtgaggtcaaactaaccctcaaatcataaacacatttttgcaccaatgatgaacaaaactgaccaactttttttttaatctctgaaaaaacatttcaaaatatgtaagaggagatattagaagaagcgctagagttctaacatggaagatatatgttacctttttttcttgcagggccttctccaccttggcaagatcattaaggacattcagagacacctgggccttattttctgaatcatttagcacatctttcagtgttttcaatgtttccagatatgcatgtccaggttggcccttcagttctgtttatttaaaaatatttagtttgaaaaaatcatattaggaaccaatattattacatagaccattatcctaaatgaattccaatacatggcaaaggagaccccatgattaaaatgtaaaagggtctctgttaattaacaacatagatcattccattggcatttctgagagtcagacagtgacttcattcctgcggatgttgacgtttgaaatattaactaacccactataatttttcttcatttcttcatgatgaaatgtctctctgaagatggaacaacaatgtcccttttgttccatataatctcctcttccttaacagctacacaaagaataaaagaaaacaaagatcccttcaaccagtcttgctgtaagctccaccgtgtagacaaacccaggtccagagtggaggagattatatggaaatactgccaccatgctgcccaggtaccctgagaaataatgactgaacagccagctggaacagtgtctacctcagtcactaatgtaaaaatatcacagaagtaacacttgcgtggaaaggaagtgagttctcttgaagcacaaagaggtgaaaccaactagcagcaaaagttaaactgcctactgatccttgtcaaaagtgaaagcacagcttgtaccaataagtggagaaagaggtaccctcaaagacatatttcacataactgaattcaaggaacaaagacatgctgtccagatgcactttcagaagaaaggcaatacgacacatttgcctagcatgcacacatacagacacttccagtcatcacacaatctacaattgctgaagttaggctgggttacatgtggagcatttcacacaatgctcaatgcatttcacaaaataatgcacaatgcaacacagttcctaactcaaatggcagctaggaagtaaatagtgtaacgtaggagggatgagctttcaaaatctttaacagtgaaccttccaaaaccaagtgtattccaaaagtaagaactctaaaatttttctgaatctgacagtggaatatgatttcttttaaaagacagtatgagactgccaaaactttaactattttgaggaaacagaagtaagggatcattcattttgatcctcctagcaatgatattaagtggcctcctcaaccaaaggaagaaattgcacctgtttctcaaaaaaaaaaaaaaaaaaaatctttaaaaatcattatatccaggtcaggtacaatggctgacacctgttatccctggtattttgggaggctaacatctgttattttgcctaacacctgttattttgggaggctgttatatcacctgttataatggcttacacctgttattttgggaggctgaggtgggaagatcacttgagcccaggagttctagaccagcgtgggcaacatagctagaccctggctctactaaaaataaaaaaccagcca

SEQ ID NO: 451 - DNA, 4023 bp, Homo sapiens
ggaccccacattccccgttactgatttttcctccttagcttctagcatcaaatttaacccttccagaatggtagtcatcatttcacctacacccacagaagcttctccttcgttattgcagtaaatgacaccacaattcacacaaagtggaagctttgtaaaaatcctgagtcatccttgaccattcactttttcttctatcacacatccaattctttccttaggtctcttctttattttcaaacctaatatttctcatgccctccatcactacttcgttaagcctccctagtgtatgggtccatcctctctctccaagcctgcagtaaccttataagaattctttctgttttcattcctgccttcccagagcaaactattcacatgaaaaccagagagaggccgagtgcaatggcccatgcctgtgatctccacgctttgggaggctgaggcaggaggattgcttgaggtcagcagcatctgaccagactggcatctggtctcaaactgctgacctcaagccatccttttgcctcagcctctaagaaccccatctctacaatttttgttttttttttaagacaggatctggctctttcgcccaggctggagtgcagtggtgcagtctcagctcactgcaacctccatcccctgggctcaagccatcctcccacctcagcctcctaagtagctgggactataggcgcacaccaccatgcccggctaatttttgtattttttatagagataaggttttgccatgttgcccaggctggtctcaaactcctgagctcaggcaatccacccacctcagcctcccaaagtactgggattacaagcatgcaccactgcatctggctcaaaaatatttctaaaattatctaggcatagtggtgaacatctatagttccagctacccaggaggcaggaggactgcttgagcccaggagttcaaggctgcagtaagctaggattgtgccactgcactccagcctgggtgatacaacaagatactgttgctaaaaaaaaggaaacaaaacaaaaagccagagtgaccttaaaagatctatatcacatgtcacttccctgttcaaaaccttccaattgctttctgtgtaatatcatacttgaaataaatcccaagtcctttcctccaaggccatagctaatccatcctctgcctacctctaacctcaaatattcccattctccaactcactaactcctctctgttttattccagctacactgccttcattctttattaaacagaccaagttcattcccaccacagagttttaaagcctgctattctccacgcctgaatgttcttatctgaaccttacaaggctcatctcttactttactcagttctttattcaaacatccccatctcagaaagtccttccctgaccatcctatttgaaataacccacctagccctaactccttgctactcctccatgatattattcattatccatctgcctcactagaatgtaagctccttaagaggagtttcttcttccttgttcaatgctgtacctgcagtgcctagaatgatgcttgacaggtggcaactgattaagaaatatttgctaagtaaataaatggtcccactcaaatgtcttaggggtaaagcaagtgtcataaatgtgtttcaagccagatttaagacaagaatggataagccctgagccaaactggacaatcagcaccctctcttaatttaaaaaatgatgcctttttttttggccccagctcactacccatgctggagttattctagaccatcgtttttcaaactggatgggtcataatacatttagtcagctgagagaagctacagtctacatctcctgaaaaccgtaggtagtaaagttgaaaaactcacctccttgctaagtttctccagttgagtttggtagtcacctagtcttgtctgcacccaagtttttattccagcaactggaccacttcgaagattagtctctatttccttcatgtttttcagagatgattcaattgtttctatttcattaacaaatgcctaaacacataaaagatgcatgttgagttcattactatataagtggatgccataattatagtttgtctgcttatctccctgcaaatattacacaagcagactgcttaagagtcagtacttctaactacttaagaaatattgtgccttaagaaactcatttcacctgggtgcttgatatagccatctgccaaattagactggaaatacttgactctcagaagggaatagccttttaattaatgtagagaagcctgatgatttcaccaaatataaactgcatgcactattactagcaaattcatttcttgttttttgtttttttaacactttaagttctagggtacacgtgcacaacatggagtcattgtatattgcttttcttgtgccacatggtgaggatttaagaaaaacatacttaaatgaatttgatgaacagacacttctcaaattcatttgttaaatatgtttttcttaaatcctcaccatgtggcacaagaaatgcaatatacaatgactcctaatgaaccaaaattgttcttgttctctattctataacctctcaaaattctataaccacgtccagaaataaaaacttgaagaatctgtcattcttttattagctataaagtcataaaagctttatgatgaaagatattttatctagatgtaatgctatgctatattctcacaattttaataatagcagcaaataacatagaaaaagaacaaaatgttatttatgacaagttccccagatcagcagaactcacagagcactggtctaactgcctctgtagacctgcgtcgtctccttgggcagcctgctgtttcattaagaagtctttcacgccatccatccacttctcaatgactgttgaatcggcctaatcgaacatgataacagagggggatattacttcgtgacgttcagcctactacatctcaagatctaccgccactggaacaaaggaactttttaaagctccgatagcatcgctttcatttatgttatttctttttctaaaccttccaaatttgaaaatgattattttcttcattcttgactaaaatcctcaagagatgacaggttagtaaccactctaaaaatttccaaacgctagctctttttgcttaaatgcaagcaatagttatgatttaaaatgcaaattacagggaaaaaatgcatttctaggttttatcagctataaaatattttgctctgatataatttagaacaatttttctctaaagttagtaactcagagcaggaataaacaaatagcacggtagagggaatacaatagatggttctcatttctgcttttggatgcctttttatctgagaactcaagacagtccccgttcagctccaatatttcatccaacatttattaagcacctactatatatataaaatccagctactgtgtatggcgataggggttcaaagacaaatgtgaaagcaaacattttgcaaagagaaagagactttagagagaaggtaacattggaaccaggccttaaagaatgcaaataagggccaggtacggtggctcacgcttgtaatcccagcactttaggaggcccaggctacggatcacgaggtcaagagatcaagaccatcctggccaacaaggtgaaaccccgtctctattaaaaatacaaaaattagctgggggcgtggtggggcacctgtagtcccagctactcggggtggcttaggcaggagaatagcttgaaactgggaagcagaggttgcagtgagccaagatggcaccactacactccagcctggcgacagagcaagactctgtctcaaaaaaaaaaaaaaaatgcaagtaagtagatgcaattttagcttttgagctccaataccaaaatcattgtcatttctttccataggtgggcaactgccatgtttttctctggtcttctactgattacatgttcccaattccttccatgatgtctgt

SEQ ID NO: 452 - DNA, 4045 bp, Homo sapiens
aaacaagtaattatattttctaaaaatctacctaagtaacaggaccaaaagttaagtaaattactaattcacaaaaatatccatcatgggattaaaaaatgcataaaattgagaaattagcacaagtgatatatgatataatttcacaaaaataatttcaactattattaattatgggagggtgaggcaggaggatcacttgagcccaagagttcaaggctgcagtgagctgtcataccactggactccagcctgggcaacagagcgagactatgtctctaaacaataaataaatgaataataaaaagttaaaaataattattaattatatggggaaatgctcatgacacaaagttcaaaggcagagaacagtactatacaagcaaaatgatctcaacttttattaattatattactaaaaataagtagtcattttcctacaatatatgcagaataagaggcattgttttatatacacactttttatatacataaatctaattaaccatatgggctaaatagcattcccagtttacagattggaaaattgaagctcagaaaggttaaattacttgcctacatacacacagtcaaaagaagagctaagattccaacatggctctaaagctttaagactccaaagcctggccaagtgcgatggctcacacctctaatcctagcacattgggaggccgaagcgggtggatcacctgatgtcaggagttcgagcccagcctggccgacatggtaaaaccccatctctactaaaaatacaaaattagctggggtagtggcacacgcctgtgatcccagctactcaggaggctgaggcatgagaattgcttgaactcaggaggtggaggttgcagtgagccaaaatcatgcaattgcactccagcctgggcaacatagcaagattccatctcaaataaaaagataaataagtaaataaaagactccaaagcctttgatccaatatactaccttctagtatgcatacataaaagataataattaggaagaaatctacaaactgttttaaaatgtttatcttagagtttgctttatacttttctttattttccatatttcaagaatatatacgtattcactcttacattaggaaaaaaattaagcttttcatatttttcattcactctgtctctcactctgctatatttgagaagtgacatcttttctctagcagagcatccgtctcctggaatgtaagtgccacattttactcatttctgacctttaatccagttgtccactcagttcccacatggtaccatgacatttttaaaagcctatctacccccttcccttttcttttttgttaagcaaacctaccctctttgcactgtatttcatttaagaaacggttattaagttaacatgtgctacacactgtgctgggaactgaggaataacaaagcatcgggtacatttcttggcctcaaggagttcaaatccaggcttgaagacaagctcctacgacaagatcccatggctcaaccactgtcttaacttctagcatctgaaggtaagagacaggaatcccctataaactgtcagtgctgtgtttagtgagtaaaaataacttgttgatgaaacaagagagcagttgtcctaataacatatggcagagctttgtccagggcctactaaaataaactggaaaaccactagagtgcttcaacatgtctaaaatgtaagatgtcaaacagctaaccacgtcttgaggctgatataatgggtcaccaataatctaaatacacatgattgtataaacacttcaggctatggaagaaaatgcaagtgacattgaaaaccactgaggaagcaaatgcatttgcctgcgtaaagcattacattcctcattgtaatacacgtgtggcctcatcacagcaaagagaaatgccgtggagatcacgggttccaacctccagggcttcgttgacagcatccgtcttctcaggcaggacctctgtgctcttcatccgctcttccaaagtgtttaaccaggtagtttcaagatccaaatagtgaagcagttcaatccaacaagaccagacctcctaaagcatgaaaaattttaaattagacaaaaagccatttcacacatcgtatctctagtactacacattctctttaatcgctaataatttcatttggatgtgagtatacctaggaattcagaactgatggagttgaaacttcaaaaaaataaaataaaatcggccaggcgtggtggctcacgcctgtaatcccagcactttgggaggctgaagcaggcagatcatgaggtcaggagattaagaccatcctggctaacacggtgaaaccctgtctctactaaaaatatatatatatatataaaaatattagccgggtgtggtggcggatgcctgtagtcccagctactctggaggaggcaggagaatggcgtgaacccgggaggcggaggttgcggtgagctgagattgcaccactgcattccagcctgggcaacagagcaagactccatctcaaataaaataaaataaaataatcaacaaaatcatatgagaccagttggtgaagggtggggagcaaagagtgggcaagaggctgcctcactctttaaaataaattccatgatctgatttaaatgtcaaaaatagaactatataattagtaagaaaaacaggagagaaacattatttagtttgttttttaaagaccaagtgcggtggttcacacctgtaatctcagcattttgggaggccaaggcaggtggatcacatgaggtcaggagttcaagaccagcctggccaacatggtgaaaccccatctctactaaaaatacaaaaactagctgggcatggtggcaggcacctgtaatcccagctactcgggaggctgaggcaggagaatcacttgaacctgggaggcagaggttacagtaagcccaggccacgccactgccctccagcctgggtaacaagagtgaaactccatctcaaaaaaaaaaaaaaaaaaaaaaaaaaagtttggtttttgaacaaaatgaaaaaattgctcccaattgtaaatttttaaaaaataatttcatagaaaattgaaatctcctgggccccacccaattccaacttggagctaactgatgtaaaagtttgcaatgtagccttcccaacttttttctaaattcatgaggacatgtcaatataagagagccacattttaccaaaactggagttatactgttcttactgtgttggttttgatcactcattcccctctgaggtttccagagcagggacccaggggttgtgtagtgggtggaaacatttataaatttataatcccttattataagaggaacttatttgagtggtaagtttaggagaaagaactcagctggatgcctcctgggcttgtcgtcttgaatgtactgaatgagtggaggcatcttctggtttacataaatgagtgaaggcacctgccggtccactctccatatgaagtatgcttaccagatcaaggagcagtacatttttctacaaagggccagccagtaaatattttaggttttgggaggacacatttgcttcctatcacagattcttcttggaggggggtatgtgttgtacaacccttgagaaatgtataaactattctcagttaaccaggtatccaaaaccaaactacaagttagatttaaaccctcagccagtccgggtgcagtggctaatgcctttaatcccaggactttggtaggccaaggcaggaggatggcttgagcccaagagttccagaccaacttgggcaacatagcaagacccccatctctacaaaaaaaatttaaaaataattagccaggtgtggcattgcaaggctggagtcatagctactcaggaagcgggggcaggaaggtcacttgagcccaggagtttgaggttacagtgagctgtgatcataccactgcactccagcataggtgacagagcaagaccctgtctcaaacaaaacaaaacaaaatcctcagccataattttccagc

SEQ ID NO: 453 - DNA, 4036 bp, Homo sapiens
ctactaaaaatatgaaaattagccaggcatggtgacaggcacctgtcatctcagctactgaggaggctgaggcacgagaattgcttgagccggggaggcagaggttgcagtgagctgagatcacgccactgcactctagcctgggtgacagagcgagactctgtctcaaaaaaccaataaaggtctaggagataaatcatttcaagctaagaccctccatgcaaactgaatagcatgacatataagatcttatgggacctcattttccaatccttcccctggtcattgaaccctcctctcctttcaatcctttgcagatctctcacacgacgatgctatttatgcctcccacctctgctgttttacttcttctgcctagaaggccctccctagaagaaatttatagaaaattgctataaatgctttaaaactcagcttcggcatgcttcctctgtgacacttaaattccacagcgcatcatatctgcctctgtgacactttatctttttaatgatgttttctttcatcattttcttcttcttagtctttgagttcctaatcatacttgtatcttcagtgctaaacatagagctcaataaatatcgatcaagtcattaatcaatcattggcaaaattcagcaatatgcttagagaataagttctaagataacttgctttcataagaaatagatactttaagtgtttactatgaatagtcaaggcatgcacattttccaaacactattgcatttaatcctcatgacagtcctctgtggtgatatcatagttctcatttccagaggaagacactttggccagagagttctgtgctctttccaagttcgtacagcataatattgagagcataagacagtatgatcacttactttctatgagatcttggacaagttacttaacctcgcctctcttagcctcagtttctaaagctgtacaaggcttaacagtcccctaagaggtgagtcatgactcctaaacaaggcaatgtgtgcaaggtgccagatactctctctgccatgtggtaatctctcaaccaaaacgtactaattattatttgtctcttaccaaaacacacaaaataatagattttttaaatgaaaagcaactgtaggtcacatgatacttgaatattttaggttgcataataatactggacctgataaagtattagattggcctttcacaaaatgatagcttatcactaaaataatacttcatcaacagagttaaaattaacagaaaaaaaaatcgtggagtttttaaccctaaactaccaacaagaaacaaacaaacaaaaaagatcattaatgacggaatatatgaaacaaagtagaaatcattcataaatcttgactgtctcagaaaataatgtcaaataattttaaatatggaaagtgtctatagtgttgggcattatattccaattgcaaaacaaatttgcaactggaagatgcccaaataaaatctgagtcactgtaacataatctgacataaaaattaataatactatattatattatattatattacatagatgaagaactttattattggcaaagcatgaatagaacacaacatttgacaccaaaataacttagtgagacgtattactaaggtaggctcaatcaggaaataagcaaagggaaggtctgatcttgaacccagaccttcaaacctgaaacctggagtttcagttatttcaactactttaaattcccatcataatcaccatatcataataagcagttgtaaataaaaggaataaaggtgtttggtttttacatatgtagcatttgagtagaaaagtgagactttatggacagcctaaaaatacaggaagggagaacgtgggcagtggaggtcttaaatgtcagtaaaattcctattataatgtcaaacaataaaagaactcattagattgcatcttaaaagattctatccaaaatatgttcactcctgtgcctgcaaacaatcatagctaaatcaccttggctgcctatccttcacttctgcaacaattgcatcccagcgttggtttaaacctgccagtttttctttcaagaagcttccatctgcctgggagagtttctgcacaatcccatccccagttcggtttagtgctgcaaaactgggctggtggctgctgatgcccacctcaagttcctgtaacagagcacaactcaagattagtttcactaataagtaaatgattctgatgcaatgaatccacccaagtattgtggtatcaatttaagtgtgaaagaaacaaactcctggaaagatattttatgttagaaaaaaaaggcattttaaaacaatttaattacatttcaatgaacatgctaaatgaaatttattttgaaatctaacccaccttcatgaatgtcatcaggcaaaatacaaggaaatagggcagcttaataactaaaatgaataacagctgtttacattaaagcataagcatcaatcatgtttgatgaaaatgaattgctcatcttctttcaagcaagtgcttgaaggcattgctttaaaaaattatataccccaataaatccttatatccttgtgtcctaccacatacaagtaaacctaaatgcacattttactaagatattgcttcactggttgatatggtttggttgtgtccccacccaaatctcatcttgaattgtacctcccataatccccacatgccaagggagggacccagtgggaggtaactgaatcacaggggtggttaccctcgtgttgttctagtgagagtgatctgatggttttataagggacttttcccccactttgctcagcacttctctctcctgccgccatatgaagaaggacatgtttctttccccttccaccatgactggacgtttcctgtggcctcctcagccatgctgaactatgagtcaattaaacctctttcctttataaattacccagtctcaggtatgtctttattagcagcatgagaacagactaatacactggtctacaaatgtttaagtaacagattgaatgaatattttcaagtcaaatttaaacacttatctgtaactccaaaaataagaaaaatgcattaacacatttatttatttatttatttatttattgacacagtattgctctgtcacccaggctggagtgcagtggcacgatcttggctcactgcaacctctgcctcccaggttcaagcaattctcctgcctcagcctcctgagtagctgggactgcaggtgcgttccaccatgcccggctaattttttgtatttttagtagagatgggttttcaccatgttagccaggatggtctcgatctcctgacctcataatccgcccacctcagcctcccaaaatgctgggattacaagtgtgaggcaccgcgcccggccacattaacacatttataagaaaaacaaatgaattatctttaaattgtcatgtccttctaaataaaatacatttaaaaaacttaataaaagagaaaatatttttatcaatggtagaattgaaattgcgtgtgctttctaccattatttttaaagacctattgttatcagaactaactttgtgttatattttcccaagactgaattagacttacatgagcagctgccctgctgtcgctccagaataatttactttatgataattatcaatgatacaaagaaaaatgagatgcctaagtgtttaagtacaaaaaacagaggtgaggcatgcaaatattttttctgttcttggtatagtcttaggcataacagtttacaaattttattctaaatataaaattgtttaaataaaattgtttttcacattagccaccaaggagtatttttatttaaatttctttgaaatcctgattgaaaattgtgattgaccaatttcttaaacttttataactggtaacaagaattggaacaaaaattacaaattgtccattgacttctgaaaaattaatatattttgtccctacttctgaaatctgtcttaacaggcatacactaaccatatgtgcagt

SEQ ID NO: 454 - DNA, 4040 bp, Homo sapiens
agtatataatgtataaatcccctaggccaaagagttctgtataaaataaaaagtattcttctagaatatatgcctctgtctatgacagataaaaaatataaacattagtaagctttagtaaaatttgccccatttggacatacttgaaagtaaagcagttacatgatcccacatctctgacaacaaaatcaataaatatgagaaatgtgtgatagtaactttacacacaccttattccatgtcatatttacagtccttaagctttctgaaattttatccctttcaggtaaactcagacttttatctgaaagcatctccaattcagttctattcagccatttgagtttttcagcatgtacttccatttcttgagttaagtcctggagaagttaaaagataggtgtggttagaaggtagtcagataagggaaaattcaagaactgtattagaaacctttttggtattattacaaatgtaactttctaatttgttaagtgaaaaaataaacttataagaagcttaagctcatgctaacaaatgataactaggaagggagtgagcacatgccttctgtgtgtatttttgcactcctgtgcacaaacgggctctctggtactcactgtctcttaaccgggtcatatattatttttacactgctaatttaacattctgttcttatctcctccttgctactccatcctaatatactgttccaccttttctaactctcctcaaattgtttacaaaagagacattcccaaaaaaaccactgaaatttttaggtaaaaaaggaagcttgttagatattgtcacattttaaaaagaaaacttaatatatgttccacaaaatatttttcatcattattcaatgtttctttctcaaaatgcttcaatcatactcctttatagacaaaatctctgaattagtaagtaacctttcacacacacttatgcttgtacatgtatgaatacacactcataatttcttttttttttttttttttgagacggagtctcgctctgtcagccaggctggagtgcagtggcacgatctcggctcactgcaacctctgcctcctgggttcatgccattctcctgcttcagcctcccgagtagctgagactacatgcgcctgccaccacggccagctaatttttttttgtatttttatagagatggggtttcaccatgttagccagatggtctcgatctcatgaccttgtgatccacccgcctcggcctcccaaagtgctgggattacaggcgtgagccaccacacccagcccacaatttctttttttaaaaaaaaatgtgagcacattatgctgagtgttctgcaacaagtattttaattcttaacacaaaaaataaatatttatgaatacaaaatttatggatatttggatatatttatacatctatatatgtatgaatttttatagattatatacatatacaactataaacaatacttgttagttgcaaaccaacaaagaaaatctgattaatacaaccatgacactaaacctattgcaagctgcattttgttcctcagcaagtcactctgataattactgattatctataaagttgagttttgcagctttatagacaataatcagtaattttcttccaaatctaaaaacaaaaaacgatatttcatagccctattgtattttaaaatgataaggtcagtttacaatatcctaaaaacctttggtctaatactgacaccataatagtttgttctttttacataagtgaagtttaagctctgcaagaccaaaattataactgctctttaaaaaataaaagatattcctctttcaggttcaccacatttaccaaaaagtacaaagtttcttttcccttttcttcttgagacacgcagtatgtgactctgaagtataatgttcgggcaccaaaaggcatatagacagaaataaacaacttactcttaattcttgcaggttttctcccaattcggtggttgatctcttttgcatagcatgctcagcctttgttaaccaacagataatctcatctagctgatgcctgtacttcatcacctgcttactttctccttttagcctaaaagaatatattatttaaaaatattgaggaaaaactgtccaattaagcagaaccttacatatttgctttgaatatcctgactaaatatttcccaaaataaataatttctaataattattttaatatatattttaagtgaaacaatgtatatattctacaatataaagattgcttaataatagaccaagaagcttttttccttagttaaattcaaaaacattgaaactaaagaatattatcttccctcatcataaaaagttatgtagaaattgaatacaaaagccttttttacagttagataccactccgcaacataatggaaattttttaaaacatgaaaaatgtctttatctaaaataatagggaaaaagcataattctctttgagtgtttcacgaatattgaaaggaatcattatatgacatgttatcacattaggtggtaactattactctgctttattcatagaacagaaagaataagaacaaagcaaggtatcaagaatgggagaatcttacaagtattagggaagacaagaaacatgtgaatttggcttgtttattaaaataactattatatttgaatagagcactgttacaaaaagagatatagaaaaaaacaaagcaaaaattttaaatgatgcaaggaaaacagtcaaatgaatataaaaaaggaactgcctcaattagatctttatagtgttataagaataacatttataagaatataaaccatctgtcagaagagaggaatatgattagaactcatatgacaaataagattatgtgttttttaaaaggatttgaaagctattaaaagcctggtggtatctttatttttatagctgctataattaactgctggtttaaaaactgaatgcaatttttaaataaattgtattgtatcattcctaataagaatttatgtttttgcagctaggagttttcatttttaatcacaaaagttctcacataatcgtgcaatacatgtaataaaatattagataatacttctatatttaataaacagtcaatatttgatgtataatgtttaaaaaaatgaaaatcactacaaaatcataatttttaagtatccatcaagaaagaatgctcctttaagattaaaaataaataaatacagcaacagcactaattactaagactaaaacaagtaatctaccctccatagtgaaaagtatttaacttaaatgacaactttggaaacacccaaaatactattataggcctttgtttctaaaaaagagttgaaatttcacgtccaatgtttcaagatcatgactaatttagtactttcaaaacagaactatgaagaaaactagcattataaagtgatttcaataagatatatttgagtcacccaatattttcatctgcaaattagctaaatataatctacattttaaatattatccccaagagtaaaaacaaattataaattcatgttctaacagaagaaacaattgctcactaaggaataacccactgggcatggtggctcacggctgtaatcccagcactttgagagactgaggcaggaggatcacttgagcctaggagttcgagaccagcctggacaacatggcaagaccttatttttacaaacaatttaaaaatcagctgggtgtggtagcacacacttgcagccccaactactcagaagactagggtgagaggattgcttgagcccaggggctcaaggatgcagtgagctacgattgcaccattgcactccagcctgggtatcagaacaagaccttgtctccaaaaaagggaagaaataactctgcaggttgctgaactatgcaaatacttaactacaggcactcaatacaaaaacaaattgaactgtgtgataattctcaattactttgttaacaacatatatacaatctacccaaaatggtcccaatttaatatagactacca

SEQ ID NO: 455 - DNA, 4042 bp, Homo sapiens
ctggctctaccttcactctccattgcaatcttgtttgagcccctaactccactgacattgctatcaaaaacaccaaccagtccttagctgtcctgacccctgtgcaccagttaatgccgtccactccccctcccttgaattctgttattactctgcaattctggctttcctcctacctctctggctggctctcctgaatttccttcaccaactccttttcctctgcccatccatcaaataccaatatccttcagggcagctgtgttgctcttcttgcccttcaccctgggctctccctgagtcctggtttccaaagatttcaggaatcaaatggagttttgagaggctaaagactgcccaaaacatatcttcagtccagccctctctgtgaactagatattcagatatgtccacatctgaattccttatccctatcttccctgacacccgtttcataaactcttctgaagattctaactcatctttctatatcaattcttaggatcacttcatctatctccgtagtgaagctatagcaatatttcaaaaacatgactttcctctgcttaaaacccatcaatagctgcccactaccctcaaagtggtagattgtttgcaacatggagctcaaattccttgtgatgcacagtgagtcctccaggatctcatctctgagaacatccctcagccttccattctacagtgggctacttcctggacctatatacactgtgctcattctctgtctcttctagacactttcatttgccacttctctctacactgcactttccctcattcttcacccgaccaatacttattcatccttcgtaaattaaccagaatgtgatcttttcaacaaaaccttccacagctacccctcaaagccaagcaggtgctccacctttatgtacccatcactacctggatgttataattggttgtctgctggtctcatccatgataagctctttgagttagaaggaatgccacactctttaatgcattcctatctcttaaaatgatacctggcagaaagtgagactccaataaaaacctattgagtgaatgaatgactgtatgaatgaatgaaataaaccatgttagaatttcccaaattatgtttgttgagattttctgcacaatgagcattgttggtcttagacattcataattcaccaaagtgaattatattaaaatttacatgaaattctgcaataaccaaagctctagctttgtctgacatagtgcacccaaattaacaactgtgcccttttctgcagaatacccactgataccctttgtgttaaataaatatgtgtgctccgactgaatatggacaacctttctggcaagtgacacaggacctaacatgtctggaaaggagtgtaggggagagagagcagtggatattgtaggagagatcacaggacgccaggccatgagaagcctcataagccaaaaaagcattttggctttcaccctgagcaagatagaaaaccattggtggactttgctcagataagtcacttgatctgaattatgttttaaccaatcatattggctgctttgtctagaacagaataacaaagggcaaaggaagaagcaggggagatgagtggggcagcctttgtagtcatcaagacaagagatgatggcaggcttgaaacaagttagtggcaatgggggttgtaagaagcagtcaaatgtatgatattttttgacctaagaaaagtcgaaagaattgtagaggaaatatctatgtgccctctgacatctacaactgtcaaacttctgctacatttgccttatcacacatagccatctggctatccaataaaccatccatccagtagatacgtattttgaaggaaaagctgctaatggtgactgaggtatagtttttggtttgggggttttctttgtttctttttgtgatagaattcatataccataggattgactccaatatttctgacttaagtaataataagatgaaacttccattgactaaggtgggagatgtatattaaggcacagaagggagagggatatcaaaagctcgattgtgtatgttagtttgaggtgcctattagacatttaaggagagatgttgagcaggtagttgcatacacaagtttagagtatggagaaaggtccagaccagagatacacatgtgtgaatcacagtgactcaacaggcagtgattcccaatcagagagaccagatcaataaagcacctgcatcattagctataggataatggctaccatttaaagaggatgagagagaaaatgactgatatggagtccatccaaaccaaggacagagacatatccattcaatgtcctatacagacgtcatactctgaaatggtgtgtaccaggtcaaacaaaaaagatatctatgactttatctacttttaaccgtttcaatggcaaaaaaaaaataatggtaggagggaaagatattagttgtatttgtagtcacatgccattacatttcactggaacctagtaaatatatatttaatgaaaaaaatcattgaaaataaacatacatgtgtgaaaagtcatgtgcaaaatcaggatgctattttctttatttatttcttttttttttttttgagacagggtctccctgtctcacccaggctggggtccagtggtgtgactgcagctcactgcaacctccacctcccaggtataggcaattctcgtgcctcggcctcccaagtagctgcgattacaggcgtgtgccactacgcctggcaaatttttctatctttagtagagatggggtttcactgtgttggccaggctggtctcaaactcctggactcatgtgattccccccatctcggcctctcaaagtgttgggattacaggtatgagccaacacacccggctcagaatgctattttaaggtcttcattttcagaatatcatcactggaattttcttactaattccaacatatattcattatttaatgtagtatataatgtataaatcccctaggccaaagagttctgtataaaataaaaagtattcttctagaatatatgcctctgtctatgacagataaaaaatataaacattagtaagctttagtaaaatttgccccatttggacatacttgaaagtaaagcagttacatgatcccacatctctgacaacaaaatcaataaatatgagaaatgtgtgatagtaactttacacacaccttattccatgtcatatttacagtccttaagctttctgaaattttatccctttcaggtaaactcagacttttatctgaaagcatctccaattcagttctattcagccatttgagtttttcagcatgtacttccatttcttgagttaagtcctggagaagttaaaagataggtgtggttagaaggtagtcagataagggaaaattcaagaactgtattagaaacctttttggtattattacaaatgtaactttctaatttgttaagtgaaaaaataaacttataagaagcttaagctcatgctaacaaatgataactaggaagggagtgagcacatgccttctgtgtgtatttttgcactcctgtgcacaaacgggctctctggtactcactgtctcttaaccgggtcatatattatttttacactgctaatttaacattctgttcttatctcctccttgctactccatcctaatatactgttccaccttttctaactctcctcaaattgtttacaaaagagacattcccaaaaaaaccactgaaatttttaggtaaaaaaggaagcttgttagatattgtcacattttaaaaagaaaacttaatatatgttccacaaaatatttttcatcattattcaatgtttctttctcaaaatgcttcaatcatactcctttatagacaaaatctctgaattagtaagtaacctttcacacacacttatgcttgtacatgtatgaatacacactcataatttcttttttttttttttttttgagacggagtctcgctctgtcagccaggctggagtgcagtgg

SEQ ID NO: 456 - DNA, 4034 bp, Homo sapiens
tttttaaacaacttaataaatgaattaatggaaaatttttctagttaggtaaatacggataactatcactcacaaaagcaaaagctatttgagggtcctcaataatttttacaagtgtaaaggggtcctgagagcaaagtgttgaggtgctggtaatgctgtagaacaataagaacccattacacacagccagtgtcagtgtaaactgggccaagtaatccagacagcaccctaatggcagctagtgaagtagaaggcacccatatgctaaacccagtgattccatcactagatatacaccctacagaatatctcacacatccttctgccccatcttcactttaactttttttgtagataaaaaaaattcattgttttaattcatcaaatacctattaagaacctattatgtgtaaggggctattctagacgctgcaggcatgagagtgtgcaagacaaagtttgggctggagtgcaatggtacggtcttgggtcactgcaacctccacctcctgggttcaggcgattctcctgcctcagcttcccaagtagctgggattacaggcgcccgccaccacgcccagctaatttttgtatttttagtagaaacagagtttcaccatgttggccaggctggtctcgaactcctgacctcaggtgatccacccgccttggcctcccaaagcactgggattacaggcatgagccaccgtgccctgccagagcttgcattctatcaggaaaatggatgtgtgttatgaagtaaaatcaatacaagaagacagagacagggtgtatctgagatattgtgggcaagaaagggctattctagaaagggatatctgaaggagaactaaaggaagtgagtatgtgaaacatgaaaatatctaagagaagaacatttggggaagacaagaagaaggaacaccaagcacaaagaccagaaatgattacgttcttggcatgtttgaaacagcaagaagaccagtgtatttgaaacagaatgaacaaagggaaaagtagtaagaaatgtgattaaagagacaggcagatatgcatggtgttctggactaaggccagactttggaactcatttatgtggatggaagtgattaaaagactgtgaacaaagaaacgacacaatcaaactcgtttaaaagaatcactctatctgctatcagaggaataggtcatggagaagtactgaggcaagaataaaatcaggattatgagttaggagcatattccaataatctagatagaaagataagggtgttcaagaccacggaagtaggtggaatggaacatggaaatgatgctacttgctgatggattgaatattaattccagagaagagttgaggttgactacaagtttattggcctaaggactgggtgaatcatctaaaaaaaaatgtctacagttctgggactggtaagcataggtagaaaagagaatttagaggattgtagtatatccaatgttatgtaatactgtacatcagtttaaatgagtagactagagctacatgcttcaaaaggtatggcaataaggatgatctagtagctatcagagaaagaggatacgtaagcagcccagagaatatgggatcctatgcataagtggaggagctggtcttaggaaaagagataataaccctttcactgaataggaaggaagtgtgtaaagtatatgggtacagccgcaggtagcttgatggattctctggtgggaaaacgaaaaaggttttttttttcttttgaaaatgagatgaggtcactagttgagaaatgagtaccaaggagtactcagaagaaagtacggtaggactgtctcttagcgctgagtgcttatttgaaatgaatagtcatagctctgaaatgagtacagtcggcaaggtgttggcaaggatgaacctcaaaaacattatgctaagtaaaagaagcatcgtatgactccatttatatgaaatatccagaatagagaaatccatggaaacagaatgcagatcggtggttgccaggggctgggagtaggagggaatgggaagaaactgcttaatgagtaagaggttttagtttggagtgatagaaatattttggaactagatagaaatagtggttgtacaacattgtgaatgcattaaatgtcaccaaattgttcactttaaaatggttaattttattttctaaataaaatgttaaaaagaaggaactgaattaaaacactgcgtaggaggagagagacatactaagattagcttcaggtctcaggcctatcccaaggacgaatatcctgttaaaaatgagccatccacctaatggaagttgtagctttgctgttagctttttatacttctaaatatgtattcaaattttccctgctcctttaccatatagaggttttaaaaagtaagataacccatgacgattttataaaatgcatcaaattctttccctatgattatggagttgagcctgtatttgcaaagcagcagtacccaaatgtcaactcaagtgttctgaatattaatcaagaaacttgatcaggccccaggtactttttgtgcaaatttccagaaatacaagtaataaaaaacacaaacttggtcctcaattagcttgcaatctcgaaaaatgaaaaaaaatatattgtctgtcatcacttttttcaaaacttgaggggaggaggaggaagagaaggaaaagaaaagaaaaataagaggaataagagaaataaaaagaaccctcccaaaaaaaagaggtagaagaggtagaggtggaggacgagagaagaggtagaaagtagaaggtggacatggaagtcaaggaggaggagaaggacaagggagaagaaaaaagcggggaggagcaataaaaagaatcagcagaagcagctgtcagggagtgagtggacagttagagttggtcacatttgcggttttgccaggtgactcaacagaggaagagcagggcatgatggttcagaaaacttgcaaggcagtggcaacagtggctatggggcaggagcctgcgatctaatctggataaagagagaaggaaatagtgagaaaacattcttctttctccacatccaagtgagaagtatttgtctcctaggttggagaatgcttctaaatatccatcccccacctgcttcccaggatatctaagccttttgttctcagtcatgatcagggtctaattacatatgttaaccaagctcatgttaacacaacaagttatagctgatttcctgaaaagctgcctggacccagaaaactagtccccagtttttgcacctagcctctcatcttcccttcggcaggacctgtggatgcccaggtagcactggagtccagagaaaggccagccttatctgccgcgagaacaaatgccttacccacactgggcagccaaatgtgtcttgggtttaaagaagatgttctttccaaatcattgaaagtagattaaataaagaaaatggcacgacgtttctaagtctttctaattcatgtatgaggctcatatcacaaaattttacatactgattttttaaaaaactttgttaaagataaacatatcttaccagcaatccttgtctgtgaaacagaactgggctcctggatgcattccttcagggtggtaggcacctctctgcaaatctaccgcatcaggacaaacagaaagagaagaatactacgtaaataaagatgactgtagttcaaaagaagaggtgttattctgaatggcagctctgctacttttcttcccctaacgacctaaacttctggctctaccttcactctccattgcaatcttgtttgagcccctaactccactgacattgctatcaaaaacaccaaccagtccttagctgtcctgacccctgtgcaccagttaatgccgtccactccccctcccttgaattctgttattactctgcaattctggctttcctcctacctctctggctggctctcctgaatttccttcaccaactccttttcctctgcccatccatcaaataccaat

SEQ ID NO: 457 - DNA, 4023 bp, Homo sapiens
aggaactaaaaatagaaattaacattcaccagggaccagaagaggagggaaagatgtcacaaaggggatgacattttagctgctgcgtagaattgcacctgggaagaaaaggccaagagaaataaaataatgcaaataaaggtaagaagactaggaaatgtcaggatattttaaggaataacagcataattacaggccgggctgagggctgaagtgagaaaaggggtagtggcagcagattgtgacaatccctaggtgtcactcttgagaatttagacttcgtttgctattggtagtacattcccactaagaagggtttgtagaacctagatgcttctgagctagaatgcaaaccccaagcaaggatctttgtttgctattgttttgtatgtttattttttgttgttgttttctctcatttataactaaagtatccccaaattaatgccagtcacataagcacatagtagttgctcaataaatatttgtggactgaattttgggttgagttaaaagacacagtaagacctgattttagagaataaagtataatgagagaaaggatttgcattcttgtgagttcctttaacctttttttattcctctaaaagaaagcctaagttaagagaagaaaacccaatgtgtaagtaattacttaagagtcgtgatgttaataattaaggacttcataaggttattgtaacaatgttcacaaaacataaaaacaagggaaagctacatttctgtataaataaagagtaacaaatattaaacactattactttctagttgaataatctttgaaaatgtgtttgtgtgtgtgtgtgtgtgtgtgtgtgtgtgtgtcaccatttgcagggaaagtggatgataatacataactttttttaaaaaacttacatttttctgtaattgctgttctcatatctgaactggaagctttatttttcaaattctgtgccaatgtaaaaacataatccagctgaggatggcgctgttctaagtcagcctttgtaatctgttaagtagaaatgattattcggataggttaataagccatatgagaagaataataagcaaaacagttgtgctgacatcaaagttgtcgttgttttcctcctctatggcatagtgaagcatcagcaacgtggcagaaaatgagtgcatgatttaaagtcaaggatcctgcattcaaatctcagttcttccatttagcacctgagtcaccaggcaaggagctttacctctctgtgtttttgttttcacaaaaaagaaataataaaatactgacagctcaattacatccagtctgaggacattaaacaaagaaaatcccttcaaaagctgaaaaatgccctgaaaacattagcagttattgctgctgatgatgacttgcatatctgttctgtgtcaggtacgaacacaaactaatgtcatagggttgggggtgacacagaaaagtgctaagaggaataactataaattaaatcctcttagacacgaaaaactgctgctgtagatggtttgtctctcagtgctaataaatatgggagaaatggtaacaacatcaggaaaatcatgtgttttcagtacagaactaatgacagtcatagagactagaaagcaatttacaaaaaatacaaatagtggcaaatgactttttcccagtccttcctctttacaaattcacccgttttgtagattccagctactcctttggtgtcaaatattacttctaaatggattgctcacaactttcaatcctaaatcccagggcacatggtaatgaatactgatcacttccttctaaatggcataaggactccccaccacaacacgtctgaaactaaatcactcaaaccctcattcacactcaatttcttctattccttatttctgctaattgcaacagcatcatcttagtcatttcagaaagggctctttgccttgatttatgcatttcttgcctccaatccatcctagtcttctactaaagcagagcacggttatcatgagttcataaacacaattttaaaaagaaaaagaaatgggaaggaagatgtttaccaattgcttacagactaaaaatccaaagggctttgcacagcctgcaggctccttcacaaagggaatttgagctgcttttcctgccttgtttcacactgtatttcttaattgcacaaatgttggccctactgtcctttgtgcctcctgtaccacatgactttattcactctgttccctataccaggaatgtcaccactttgtcccagatgccaaaatcccacacagtttgctttccatcactggagaagtgatccccttcctcatcctggctcccccaacaggttgcctgtacttctcctgaggcttttattagactcttgccttgctacagtaatttgtcaactcatatgcactcagtgcctctgcctcggtgtggacttatttgtaatgtggggataaaaacagtacctatctcacaagactattaaagaattgaatgagataacgtgtacaatacttagaaaaatgaccagcacacatgaagcacttaataaaatttagcaagagctgttattattatttcattgtagtttcccaatttctacctagaatattcttgtcagtatccttgtaccactcacagcccagaacttagcacacactaaatagggaaaaagaatttttacaaatgaatattagatggtacatgtatagtagtaaagttataggagatattcacttttaaaatcagaaattaatctcattatgaaatataagttgcaaaggcactttaggagattatcctacatcacacaacaggcatgaaatgctaacgccagcttatatttatactaatgtgcctagctttacggtatcagttttagattttaaaaatgcactgggtctttagtttaagtcagtaaacctgatcatatcacaacagtataaatgcaagaaaagctctatgctttgtagttagccctgaatggttgtttgacagatacagaattttttaaacctcattctctcatagtttaggataaacaaaagggattcaaacagatctggtctacctctgggttgtggcgtttccatgacaagcttttacactatgcacctactttcattcgggaaacggtcttattgatctcttctacatccccaacagtgacaatgttggacttcagcatctggtcgattaataccagccagtcggctagttctgttatagttttatcaagatcagcaggaattgaaatttccgaagtacgatgagactgaacaggaatatctgacgcagatgatactagcaccaccttttggacattaggatgagctgaaatgaaaaatgtagcaaaagagaaattaatcaacaggatgttttaattatggtggtgtcatggtgacacgtgtatgtgtatttaaataaaatttagtttaagtaaaaaaaattctaagaggttattttttcatactgaaatggctatggtattacctgtaatatccatatgtctttggtagctatcaagccaacaaaacagttttgcaacattctataacataatcagcactgacactgagaaaaattaaaagtacaaatgtgggagaactggaagtattattttattttggcaagatgattttaattataaagccaacttattcataattttttatttttttcatttaactttataatgtgagcatattttattcttagtaaacacaattatgaatacctatgtaataacctatacccatattcacttttatttaacccttggatatttagattgctcctgaaattttattttaattttttaaaaaacttgcaaagaatatcttttcatgtagagtattttgcacatttctgatctctatcttagcatagatttcccaagtagaattactgagtcagaaaatacaaaaaaaagtatgtatttaatattcattgccaaattgattggttttgatacaataagtagttgaattagtaattaaaactatctgtaacct

SEQ ID NO: 458 - DNA, 4033 bp, Homo sapiens
agctatcaacaaggctgttcaggccttaagttatacttacatgtcatcattctttaaaacttgctcaatgagacaatctgtttcattctgtcttagctgtttaaataaattgcttaagttttaaacttaaggaagagaggccaaatctatcataatgttctcttgtcagttaaaaagttacataaagtacttatgaccaattctattactaatagaatcctttaacagtaaacaaatgaaaccaaagacatcaagcgagagtaaatatcacaggtttatcataagaaataggcaaattatcccattcattgtgagttaagccctaaaacgaggttactattggtagcaatacattccccctgggaagggtttttcatataatgaggagtgatgaaggttatagaacctctacacacacagaaatatttatatatagagagaaaatagagtgtgtacattcaatgggaaagggaagatatttaggagaagtcttgtaaaacaaaaaaacaaacacctgaaagaagttttggacaaaaagagaggtgatggaaaaaataataattaaaagaaaacatcaagatgatagaaaaagcaaactggaaatggcttgtcaatagtttggtatcactagagcagaggagctcccctgtgatgtgagggaaaccagctcactccaaagttccataataggcacaatccatccattcataaaaagagaaaagaaggaaaatgatgtatttagtaaaaataagccaacactgttagacattaaaagttcttttctaatgtatctcctataataaccctgttgctaccatgactattttgaaatcaaaacatactttttacagggagagtagctgactttcttcccttgacaaatattaggatttatccttccagtttatattttgtcacaaatatttattaggtagttaatttgtattggcactgttaaaggcccaagggcagaaagacggatattcacaatctatggaagagagagacaattaaagtagttgtaagatctataataaagcaatggggggaaaggccatagaaggaactaaaaatagaaattaacattcaccagggaccagaagaggagggaaagatgtcacaaaggggatgacattttagctgctgcgtagaattgcacctgggaagaaaaggccaagagaaataaaataatgcaaataaaggtaagaagactaggaaatgtcaggatattttaaggaataacagcataattacaggccgggctgagggctgaagtgagaaaaggggtagtggcagcagattgtgacaatccctaggtgtcactcttgagaatttagacttcgtttgctattggtagtacattcccactaagaagggtttgtagaacctagatgcttctgagctagaatgcaaaccccaagcaaggatctttgtttgctattgttttgtatgtttattttttgttgttgttttctctcatttataactaaagtatccccaaattaatgccagtcacataagcacatagtagttgctcaataaatatttgtggactgaattttgggttgagttaaaagacacagtaagacctgattttagagaataaagtataatgagagaaaggatttgcattcttgtgagttcctttaacctttttttattcctctaaaagaaagcctaagttaagagaagaaaacccaatgtgtaagtaattacttaagagtcgtgatgttaataattaaggacttcataaggttattgtaacaatgttcacaaaacataaaaacaagggaaagctacatttctgtataaataaagagtaacaaatattaaacactattactttctagttgaataatctttgaaaatgtgtttgtgtgtgtgtgtgtgtgtgtgtgtgtgtgtgtcaccatttgcagggaaagtggatgataatacataactttttttaaaaaacttacatttttctgtaattgctgttctcatatctgaactggaagctttatttttcaaattctgtgccaatgtaaaaacataatccagctgaggatggcgctgttctaagtcagcctttgtaatctgttaagtagaaatgattattcggataggttaataagccatatgagaagaataataagcaaaacagttgtgctgacatcaaagttgtcgttgttttcctcctctatggcatagtgaagcatcagcaacgtggcagaaaatgagtgcatgatttaaagtcaaggatcctgcattcaaatctcagttcttccatttagcacctgagtcaccaggcaaggagctttacctctctgtgtttttgttttcacaaaaaagaaataataaaatactgacagctcaattacatccagtctgaggacattaaacaaagaaaatcccttcaaaagctgaaaaatgccctgaaaacattagcagttattgctgctgatgatgacttgcatatctgttctgtgtcaggtacgaacacaaactaatgtcatagggttgggggtgacacagaaaagtgctaagaggaataactataaattaaatcctcttagacacgaaaaactgctgctgtagatggtttgtctctcagtgctaataaatatgggagaaatggtaacaacatcaggaaaatcatgtgttttcagtacagaactaatgacagtcatagagactagaaagcaatttacaaaaaatacaaatagtggcaaatgactttttcccagtccttcctctttacaaattcacccgttttgtagattccagctactcctttggtgtcaaatattacttctaaatggattgctcacaactttcaatcctaaatcccagggcacatggtaatgaatactgatcacttccttctaaatggcataaggactccccaccacaacacgtctgaaactaaatcactcaaaccctcattcacactcaatttcttctattccttatttctgctaattgcaacagcatcatcttagtcatttcagaaagggctctttgccttgatttatgcatttcttgcctccaatccatcctagtcttctactaaagcagagcacggttatcatgagttcataaacacaattttaaaaagaaaaagaaatgggaaggaagatgtttaccaattgcttacagactaaaaatccaaagggctttgcacagcctgcaggctccttcacaaagggaatttgagctgcttttcctgccttgtttcacactgtatttcttaattgcacaaatgttggccctactgtcctttgtgcctcctgtaccacatgactttattcactctgttccctataccaggaatgtcaccactttgtcccagatgccaaaatcccacacagtttgctttccatcactggagaagtgatccccttcctcatcctggctcccccaacaggttgcctgtacttctcctgaggcttttattagactcttgccttgctacagtaatttgtcaactcatatgcactcagtgcctctgcctcggtgtggacttatttgtaatgtggggataaaaacagtacctatctcacaagactattaaagaattgaatgagataacgtgtacaatacttagaaaaatgaccagcacacatgaagcacttaataaaatttagcaagagctgttattattatttcattgtagtttcccaatttctacctagaatattcttgtcagtatccttgtaccactcacagcccagaacttagcacacactaaatagggaaaaagaatttttacaaatgaatattagatggtacatgtatagtagtaaagttataggagatattcacttttaaaatcagaaattaatctcattatgaaatataagttgcaaaggcactttaggagattatcctacatcacacaacaggcatgaaatgctaacgccagcttatatttatactaatgtgcctagctttacggtatcagttttagattttaaaaatgcactgggtctttagtttaagtcagtaaacctgatcatatcacaacagtataaatgcaagaaaagctcta

SEQ ID NO: 459 - DNA, 4023 bp, Homo sapiens
agcattataaaagaaaaaaaaatcccaacatgtaaccctcaggagaaagaaaaaatatcatatatcaaatgtatcacaaataagtctataaacagaagaaggcaagctgataaacacattttgaaggaattttaatatacatctgccatcctatacaattgatatatttctgaaacggtgtttgagaaaaaaaaatcttgaactcttattttcagtgctctaaaacaactcccaaaaaaatatctactattataaactgatactgccaaacaattataaagaaaatactgttctatttaattttgtatttacagttgtatttatagacctggtttgatgaaggtagggtttaacagtacttcatgacagaactttaagacagagagatagtcacctgttaccctcaaaggagaattttctaaggcagtcttgattttagaagaaactgaactgtgtaagaatttttttttgcatttgttttactgtagcaggaaaactctctaaaaggaattttatatattcaagttcaagagaaatgctaaaagtaaaagagactcatgaactgtgcacccagcagctcttcatcataaaaattccatactggctcttgtccttcctcttttattattgttcattcctttcactcattatcaccttctctctctttctatttctcctcaagctttctctcttctcctttctctatttttaacaaggttttaaggacagacagatctaaggaaactttttttttttttttttttgagagagagtcttgctctgtcgcccaggctggagtgcagtggcacgatcctggctttcagctcgctgcaacctccgcccccaggtacaagtgattctcctgcctcagcctcccatgtagctgggactataggtgtgtgccaccacacccggctacttttgtatttttagtagagagagggtttccccatgttggccaggtctcgaactcctgacctcgtgatctgtctgcctcggcctcccaaagtgttgggattacaggcatgagccaacgcacccggctggaaacttaaattttttattaatcacttcagagttagttcataatcttgaactgaggtactaataaacaataacttagaatatccgcaagaacctgctgataataagtaggtagaatgttaaaaccacgctgctgaaagatgctttggatatcagacaaaaagaaaggctatagttaagtaccaggcccaagaggaacgtaactacaagataacattccagctgagttatcatggaacactttggcaaagttcttgggataatatatggttatagtgaaacataaaagctatcaactggctgggtgcagtggctgacacctgtaatcccagcactttgggaggccgaggcaggtggatcacctgaagccagaagttcaagaccagcctggccaacatggtgaaaccctgtctctactaaaaatataaaaattagctgggcatggtggcaggtgcctgtaatcccagctacttgggaggctgaggcaggagaatcgctggatcccaggaggcagaggttgcagtgagtcaagattgcaccattgcatccagcctgggcaacaagagtgaaactccatctcaaaaaacaaaaaagctatcaacaaggctgttcaggccttaagttatacttacatgtcatcattctttaaaacttgctcaatgagacaatctgtttcattctgtcttagctgtttaaataaattgcttaagttttaaacttaaggaagagaggccaaatctatcataatgttctcttgtcagttaaaaagttacataaagtacttatgaccaattctattactaatagaatcctttaacagtaaacaaatgaaaccaaagacatcaagcgagagtaaatatcacaggtttatcataagaaataggcaaattatcccattcattgtgagttaagccctaaaacgaggttactattggtagcaatacattccccctgggaagggtttttcatataatgaggagtgatgaaggttatagaacctctacacacacagaaatatttatatatagagagaaaatagagtgtgtacattcaatgggaaagggaagatatttaggagaagtcttgtaaaacaaaaaaacaaacacctgaaagaagttttggacaaaaagagaggtgatggaaaaaataataattaaaagaaaacatcaagatgatagaaaaagcaaactggaaatggcttgtcaatagtttggtatcactagagcagaggagctcccctgtgatgtgagggaaaccagctcactccaaagttccataataggcacaatccatccattcataaaaagagaaaagaaggaaaatgatgtatttagtaaaaataagccaacactgttagacattaaaagttcttttctaatgtatctcctataataaccctgttgctaccatgactattttgaaatcaaaacatactttttacagggagagtagctgactttcttcccttgacaaatattaggatttatccttccagtttatattttgtcacaaatatttattaggtagttaatttgtattggcactgttaaaggcccaagggcagaaagacggatattcacaatctatggaagagagagacaattaaagtagttgtaagatctataataaagcaatggggggaaaggccatagaaggaactaaaaatagaaattaacattcaccagggaccagaagaggagggaaagatgtcacaaaggggatgacattttagctgctgcgtagaattgcacctgggaagaaaaggccaagagaaataaaataatgcaaataaaggtaagaagactaggaaatgtcaggatattttaaggaataacagcataattacaggccgggctgagggctgaagtgagaaaaggggtagtggcagcagattgtgacaatccctaggtgtcactcttgagaatttagacttcgtttgctattggtagtacattcccactaagaagggtttgtagaacctagatgcttctgagctagaatgcaaaccccaagcaaggatctttgtttgctattgttttgtatgtttattttttgttgttgttttctctcatttataactaaagtatccccaaattaatgccagtcacataagcacatagtagttgctcaataaatatttgtggactgaattttgggttgagttaaaagacacagtaagacctgattttagagaataaagtataatgagagaaaggatttgcattcttgtgagttcctttaacctttttttattcctctaaaagaaagcctaagttaagagaagaaaacccaatgtgtaagtaattacttaagagtcgtgatgttaataattaaggacttcataaggttattgtaacaatgttcacaaaacataaaaacaagggaaagctacatttctgtataaataaagagtaacaaatattaaacactattactttctagttgaataatctttgaaaatgtgtttgtgtgtgtgtgtgtgtgtgtgtgtgtgtgtgtcaccatttgcagggaaagtggatgataatacataactttttttaaaaaacttacatttttctgtaattgctgttctcatatctgaactggaagctttatttttcaaattctgtgccaatgtaaaaacataatccagctgaggatggcgctgttctaagtcagcctttgtaatctgttaagtagaaatgattattcggataggttaataagccatatgagaagaataataagcaaaacagttgtgctgacatcaaagttgtcgttgttttcctcctctatggcatagtgaagcatcagcaacgtggcagaaaatgagtgcatgatttaaagtcaaggatcctgcattcaaatctcagttcttccatttagcacctgagtcaccaggcaaggagctttacctctctgtgtttttgttttcacaaaaaagaaataataaaatactgacagctcaattacatccagtctgaggacattaaacaa

SEQ ID NO: 460 - DNA, 4049 bp, Homo sapiens
tgaatttgtccactggcattggttctttgacatagtttttcagcctctgagagtctctggatcaaggtactcaccatgaaatctaaatgacaactgaaacctttaatataatgctttttgtagcaattgggaagattttaaatcagcctaaggtttcagaagaaaagaatcacactgctgattaaaaaataatgttctaatatgataactgaaacactgacatcacttttaattgtattcctctagttaaggggccaggggcttcactattacttgggagtcatttggtggaaacagtcagcagtatcacaaacacacagaatgatccagaaatgcatataactggccacttgcttttaaaactgtaaccaagtaaagtctgcatttgtggagaataaaaacatacttccacattttcgattgttttctacatatactttcttaaattcttcacaaatatacacttccatcttaggctagctgaagggcaaataaatgttataccaaactataacctcacaactaaaacctccaattcaagaatattttataattttatacagagaatcttaaaagcacttttaaaaataccatagttgttcaatattatcaactctataactgaactgatgacaaaaaagatgtctgctattacgaaattgataaaacagtttggttaaaaagtcattaaaggaaactaaacttacttatctgatttgttcactatagtagtcctcaaatgaaagtcttggaaaaacttattaataaaaataaccttcagggtaagtaagtaatatggtttggatttgtgtccccacccaaatctcatgtccaatcgaaggaggagcctggtgggaggtgactggatcatggggatgaatttcccctgtgctgttcttgtgatagtgagttctcacaagatcagatggtttaacagtgtgtgacacttgggaggccaaagtgagcagattacttgagctcaggaattgcagacaagcctgggcaacatggcggaaccccgtctctacagaaaatacaaaaattagctgggcatggtggtgcacgcctgtcatcccagctacttggaaggctgaggcaagaatcgctggaacccaagaggtggctgttgcaatgagctgagatagtgccactgcattccagcctgggcggcagagtgagacaatgtctccaataaataaataaaatgtgtggcacttctcccttctatctctctctgtcttgctgccttgtaaagaaggtgcctgcttcccctttgccttccaccatgattttaagtttcctggtacctcccagtcatgcttcactacagtagccctcaaatgaactgtgagtcaattaaatctcctttcttcataaattactcagtctcaggtagttatttatagcaatgtgagaacagactaatacagtacagaagggagcaaaagagggttcctggaatcttgaaagtgttctctttctagatgctgatttgagggtgtgtttcacttgcaaaaagtcagtgagctataaatctcggagacatgcatattcttacttgttatgcctccagaaatttttcgaaaaaaatcttccagatcaaattcttcatataaatttcattagacactctaagaacttaggaaaaaacatggcagggtcctattgttaagaattacagtgaacaatagaaaaaaagtatatccaacaaaacaatactgccaaaaaatatctgatgagtcttacttggttatcagaaatttgtttggtgagtggatcccgtcgggcttgctgaagaatatagagtcgagcctcatattttctcatcagttcttcagtctcctccctatggtcatcccactgaagactgtcaataatcatgtcctcaagctgctgctgtcttagctcaacgccatgctgggtgccatcccactggttcttgaccctttccactgagggtagcattataaaagaaaaaaaaatcccaacatgtaaccctcaggagaaagaaaaaatatcatatatcaaatgtatcacaaataagtctataaacagaagaaggcaagctgataaacacattttgaaggaattttaatatacatctgccatcctatacaattgatatatttctgaaacggtgtttgagaaaaaaaaatcttgaactcttattttcagtgctctaaaacaactcccaaaaaaatatctactattataaactgatactgccaaacaattataaagaaaatactgttctatttaattttgtatttacagttgtatttatagacctggtttgatgaaggtagggtttaacagtacttcatgacagaactttaagacagagagatagtcacctgttaccctcaaaggagaattttctaaggcagtcttgattttagaagaaactgaactgtgtaagaatttttttttgcatttgttttactgtagcaggaaaactctctaaaaggaattttatatattcaagttcaagagaaatgctaaaagtaaaagagactcatgaactgtgcacccagcagctcttcatcataaaaattccatactggctcttgtccttcctcttttattattgttcattcctttcactcattatcaccttctctctctttctatttctcctcaagctttctctcttctcctttctctatttttaacaaggttttaaggacagacagatctaaggaaactttttttttttttttttttgagagagagtcttgctctgtcgcccaggctggagtgcagtggcacgatcctggctttcagctcgctgcaacctccgcccccaggtacaagtgattctcctgcctcagcctcccatgtagctgggactataggtgtgtgccaccacacccggctacttttgtatttttagtagagagagggtttccccatgttggccaggtctcgaactcctgacctcgtgatctgtctgcctcggcctcccaaagtgttgggattacaggcatgagccaacgcacccggctggaaacttaaattttttattaatcacttcagagttagttcataatcttgaactgaggtactaataaacaataacttagaatatccgcaagaacctgctgataataagtaggtagaatgttaaaaccacgctgctgaaagatgctttggatatcagacaaaaagaaaggctatagttaagtaccaggcccaagaggaacgtaactacaagataacattccagctgagttatcatggaacactttggcaaagttcttgggataatatatggttatagtgaaacataaaagctatcaactggctgggtgcagtggctgacacctgtaatcccagcactttgggaggccgaggcaggtggatcacctgaagccagaagttcaagaccagcctggccaacatggtgaaaccctgtctctactaaaaatataaaaattagctgggcatggtggcaggtgcctgtaatcccagctacttgggaggctgaggcaggagaatcgctggatcccaggaggcagaggttgcagtgagtcaagattgcaccattgcatccagcctgggcaacaagagtgaaactccatctcaaaaaacaaaaaagctatcaacaaggctgttcaggccttaagttatacttacatgtcatcattctttaaaacttgctcaatgagacaatctgtttcattctgtcttagctgtttaaataaattgcttaagttttaaacttaaggaagagaggccaaatctatcataatgttctcttgtcagttaaaaagttacataaagtacttatgaccaattctattactaatagaatcctttaacagtaaacaaatgaaaccaaagacatcaagcgagagtaaatatcacaggtttatcataagaaataggcaaattatcccattcattgtgagttaagccctaaaacgaggttactattggtagcaatacattccccctgggaagggtttttcatataatgaggagtgatgaaggttatagaacctctacacacacagaaatatttatatatagagagaaaatagagtgtg

SEQ ID NO: 461 - DNA, 4040 bp, Homo sapiens
atagatgcagcaaaccaccacatttacctatgtcataaacctgcatgtcctgcacatgtatcctggaacataaaataaaataaaataaaatatttttttaaataaataattgtgtctttttaaattccgtatcttttcttcccaggatggttggacttttgctttggcagaaaatgcttaattgcaaggtaaattcagcaactgtgataattctgcaaaccaaggaaactgcattttttaagaaatttcatctgttaataaaattttagaatatctatactgcactcagaaaagcagacaaagaagtattttatcattaattaaagtagaaagagttagaaatgactatggacaaacaactgataatgactcaaccttctgctaatttaaccccagaaagtactgtgcatttgactaaaggaagtggacttatcagaaagacattatatgaaagagcatatgatgacactttgggcatctttttcttaagcatatactacctaccaagaacttttacacataacttttgatatcacaataaccccacatattagacatgttctccactttagaatcaaggaaatggtgactcggtgagttgaaataacttcctataggttagcacagaaggcaagtgcctaagatgggcttttaaccaaggattgccccatataccttacactcagtgctttctgttctgcctgtacaaacctagaaataccttaacataggcaaggtaaaatgcgataaggacaaggagaaaaacacagagtaattagtgatttctaagaaactatttatagcacacagttatactgtctcatttcctttacaatacttcagtgtagataactatgtgtgtatatacatgagtgtgcatatatatacatacctgtatatacatgcatgtgcaaacacgtctatacacacagttatatgtgtgtgtatatgtgtgtgtataaacacacacatatatgtgtatgtatatatacatgtgtgttacacaggtgtgtatacgtgtgtgtgtgtatgtatatatatatatatatatatatatatatatatatatatatatatatatatatataatgttatttttgccctggagtgccaaaatatatacagctaaaatagcattttagacccaaatcaggcatccacactgactgtgctataaacacatttcaacaatcactatctcaactggcactagaaaatttgttaattagcattaagagatggaaggaaaaaaagtgataagtaaaaaaagtagtggtcaggatatatagattagttagaaacattagagacaggcctacttttcaaagaatccaaaaaatcaggattcagttgcgtttcagaagtaatattatttttgaacattagaaaactaatattatgaaagtaactatattaattactacccctgaacagggtctggggaagcaatcaaacacattaatatttctgcagcaaggaaaaaggctattcatactaaccagaataaataaagactttaataaagagctgcatggtaattcaaagatttctgttatcaaagctgtttttagattttggcattgtagataagggattgtggacttataattgtgaatagctaaattatttaggctaactgcaattcatacaaaacatttcctttgaaagctgatattgaacttcacacattatgctgcacagtattccatgtgcaaatataacaacccttcacccctccagaatttggctgacaatgatgtatataaagaacaggctggaagataagagggcagccatggtaaaaaggcctctcagcagccattagacggggtgtgatggccacgtactggagtgcattacattatgcataaaaaaggccccgtatctttcatctgatatggcttctaaactcaacacagataagaatcagtaagcggaattacagacagaactgagaggcgggtacacaaagcagtcaccaagaatgtcagcaacggctgacagtctgattcaaagaacaaaaatgaaactgtttttagagacaataagagcctggcttgccagtcaagcttgaattccaatcccaactctgccattataagctgtgtagtcttgagtaattccttaacttctctgtacttcagtttattcattaacataggactgatgaaaatgctacctctctcctgcagttgttgtgaagattaaatgaaatgatgtgtgtgaagaggtcagtacagtgcctgacaatgagacgacactcaaaatttatacgcacaaaacaaagccccaaatctcacaaagtatagcagcctgaataaatttactgccaattcttcagaactcacagcatgaagagcattaccatttagtatagaaaaatatcatcctgactgtgttgcatgactttgaacatgtcacttaacttctctgagcctgagaatattagattagaccatgtattctcaacacaggtaataaatggttatttcttttcagggggagggtgaaaaaatgtattctttttatgtataaagcacaaccatacagtacacagtatatcatggtattaaaatttcatgggaagatgagtctacacaggctccttagggaagcgataatgtaaagaaaggttgagaaacactggttcagaagaactctaaggtcactcgtatccattaaagttccttaattctatctttgcaacaatactaccaagaattcagaaaaaagttaaatatacattcacaagctttaagaaggcaaagaaagatttatatattctacaaagatgtccatttaaaatagttaaaaattgtaaagttcactgggtttaaaagagaaaactctctttacatatagaagccctagttatcattcacgaagggatcctatgagccagttttgctctgttttccctgttttatagataacaatatatctaaatcatgtctaaatattaatataattacttatttccaccccccggaaaatgcagagagaaaacacaataaggacaaccacttgtaactacaaagaaactggaacattgtaattgtcttagctatgataaacgaaaaatcaccttgcaatataattcatttttaattgcctcttccatctaatccaactactgctgtaggctgtcttaaaatatttacaaagtaaaagcaaaaaaaaaaaataagaagaagaattggaggtgctaaataaagcaggccacacattcctaacggataaattttttgttaagtttacaaggaaaacaaagtcctaactcttatacatggaatttttggaaacacaaagacagagcatatttaaggactatatctcttttttttatgttagctatattatgcaaataatttttattcatcgtacttactgtaatacgtatatgttttcatccacagttcctgcaacataactcccataacacttgttatagccttttgttctaatattggggtgcctcagggctcagaagcaggcctcagaaaacaatctctctctgtgaccttctcctgccctttcacctccttctttctctcctgaaggcaggagtcttcccctacctttctgtcttggagatggccataaagaaattctctaacctgctttgtctgattgtaggtcttttcttttttttaattattattattatactttaagttttagggtacatgtgcacaacgtgcaggtttgttacatatgtatacatgtgccatgtcggtgtgctgcacccattgactcacatttaacattaggtatatctcctaatgctatctcttaaggttaaagctgtttttaattcaccttcttccctgcctgagttatgatatccttactaaatccaaataacctattataataaaagagaaaagttgtagtaaaatgttagaaagaccaatattatagccactctgctttaaccacttgtgaagttttgtctttgctaacccagtcttattttctccagtatccaaggtatatctaacaacacattcaacctcacattgtgccatcataaccctctt

SEQ ID NO: 462 - DNA, 4101 bp, Homo sapiens
ctaaaatttacataagattaatgtgccattcactattaagatactgcaaagtaccagagaggtaacaggtcttaatgaatgtagtagttttgcatcatattttctccaaacatttcactagcccatctcagaagacaagattgtgtcaattgcaaaagaaactatgtactaaaactaaaacctgttttagatttttaaacaaaatgtaattatgcaattcactttaacagctttcacaatcagttactaagaaagggaatctttccttgataagaacctgaaagattagtttttagagcctgagaaacagtagaactgtcagacacccgagatccttattttcaatcactcagttaccttacagagcttctgataccgaggagaagaaactgccatcctttgtaagcgatgcaacaaaaccacaactttctgcagagacgttctcaccacagccatcattttaagtttaccacacttctggagacacctcagaatttgcattataaatgaagagcaacgatcatttcctcccggtcactggacaatgatttgtcagttctctgagcatgctcgtttccaggaaagcatttgaaagatacagggggttaggttctaggaaaaaggaggctggtattccttcaacttctcaatttaaaaaacacagacaaacgccacagagaaagccccccagcagatgctcacaggcagcacttgctcagcccggcatggccagaaatgaaggaagttgtcgagcagccaagcgctgccggctgcgggagaggagtgcgctcagtagccaaagaggatattaagtgaaacattaaagctgcagatagaaagcggacatcccctgggaacagggattcaacatatcactgccaccaccacggtgcatgccctgtagctggtttctattaagagagaacagagcattcaccgtctctaaagagggatatgttcactacccaataaatgcagctctagctgtgctctgtgaattagtgaacaggagaccctgttataaatcttgagaagagcagaagggtacacctgactctgatgacaacagcccatacattaagtgctaaaaaatcacccccagacagatctcagcccaaaatcacctaaaacaaaacaaaacaacaaaaataaagcaaaacaaaaaatacttgcaggggttatatgactaagacaccctaaaagcagagcgatccagtggattctcatctgcctgcctagaaggaaagccattagaaatggaataggttaggatttgtctaattaaacagctaagtgaataaaaaattaaaagtctgtaattgactactgaacattccaaattgccacatttccccttagacagcatcttcatgatctcattgtatttgccataaagctgttttaattttatgaataggaaatatgaggccataattatatcatataaaaatccagtacataattttggggttctatgtgtatatatatacacacacttgagacatattctctactgcagcctgaacatcattgcaaatatcaactggggtaaagtactatcaggagatgtgcaaaataaccctggatgattaaatgactgggtcaaagagcacagccagaaatagaacccagatgttgctcattatcagtgtcctgctcaaactggtaaccgggctaatgctgcaatttcacctctgtctaatgttgtcatgattctttaaaagaaatgcagtattttcaagtatttgtttttcctcctttacttcatttgcctttcttagtccttcatgttacaacgatttaaagtcctatattgtgtcttacagaacggtgtttatcaagcagtgctttgccgactttattgggtcttatagaactgtgttcatcaggcagtgttctgtggacttctgcctgtatcttttttccctgcaggtccatactgagaatctacactgcctccctctggtgaggctaacaatgtcaccatatctgtgtaaagccaaaagtggagaacatattcaaaggatagagtataaaatgttaaggtatttggcaaatagatagaaatagattagtgattgttcagaggggagggaattggcggggaggaatgggaaattgctagtaaagggaaggggtttctttctgaggtaatgaaaatgttctaacttgattgtggtgatggtcgtacaatcgtgaatagactagaaacaaatgaattgtaaaatttaaatgaatgaactgtacagtatgtgaattatatgccaagaaagttgttattaaataagtatgaagctataattcctgtcctagaaccagcagatgaagtccccatgagataggcattcacccctcaaacacagtgctaagcatgcagctgggcacaggagaaaatctaaaacaatctataatcaaagtctgcatctatggaacaagacgatgaaaatgaggctaaaagcaaacataggagataaaagtgtaataatcctaaaacgtaaattattagagagcaaaaccagccacccatgacaacaccactccagaaaggcagcagaactcaggattttacccagcaaagaatcagagcatttcaattaattggtaatgccaaatgtaaagctgaaatttttaaatataattaaaagaataacaatcttttagaatatgaacatgcacattaagaataaatgcacttgaactaataaactagttggaagtcaataatgggctttcatacaaaagcaaaaaataaagtttctgcatctttggccaaatactcttatctgaatatagattcacagtgacaactgcataccaggcaattcctcctggatgttactccaatgcttcatttcaacaaagtcaaaacagatgaaatttgccatccccacacatttcccgctaacttgcaaccctgctctgacattttcttctatgttcccagtcttaggctctaacaccacttggcaatctgcctttccccttcctcagtctatgtatactattgagtcattagatctactacccctgccattgtctcctttctggtaattattacctgtagcctggatggctacatgagtatcctaacaggcctctcttctgtcactcttgtctagttcaagtccattcctcataccatcagctaaattcctataaagcaaaaatcccattgcatcactcttgttactatcctttatgacttctcttcattgccactggattaaaatataaatacttgcatggcatttaagaccctctatgagctggactgctcagttctcaaggagcttgtctctcctgcagggctccaaagaatcggcttttctcttgccaaaaggcttctgctggggaataaatcctaacagccttgcagcagggcaatgaaacatagatacataaatccaaatcatcatccatccttaaaagaatggcatgtatcatagcatactcccaaaagttaatcatcttccatgtgctttagacctatccttatcaaaattcacccaagattcaccttaaactgagcatagaataaactgctttatcttcctgaaatactcccatggccttggatctggttgtcataagacatgaagcaagtataaacagcgaatgtgtcagctaagtagttctacatacacatcctgtgcatgcagcaaagatacacggagctccttattccatcttccttagtgcacaaagactgtgcaccaccagcaccaccaccaccactgccaccaccatgccaccagaacttttctgttatgatttgccatgcttctgtacagtcattttctccaacaaacgtctctccatttccaaacaagtttctattttaaatgtctgtttactcatacaaaaggagaatcattaatatacaacaccataaaaaaattaaaattctcttgcctcagaaaaactcagtaaaaggtactaaatctctaacaatcttctatctataaggtgctgaaaataaaaccatggaacttttttaaaaatagaatggagagaacactttaaaattaagagcatttaataacaaagcaagggagtgaaaaatcatgcgaattaccgtaatgtgaaacattctaaacataa

SEQ ID NO: 463 - DNA, 4050 bp, Homo sapiens
caaatctataatttaattctagacagactgacttctactgtgaattatttttcatttttgcttgaaatattgtgtaattccctcatcaactaagtcataacataaaagtataacatttttgtcactcccataccaaactgacttacatccaaaagaaggctgtttcctttaaaagaggcattctgaagaattatgtccttattttaaagatacaaatattatgcaatttcttttttagaattcctttttggaaatgctgtctgtgtttgagtatctccaatattcacaaatatttttcctttgaaaatgaactaaattttggaaacagtcaaaaagatctggcatacatagctggcaatcaaaagggcaacttttttattaatataaaaatgtaaatgaatgaactttgtagacatttatgatggacaagtacccaatgttctctgaatacaatcagcatacttttgtgctccatgtctgaggcagaagaatagggtctggagacaggcagcctaaggccaagtcatggctgagttcttggaattgggccaaaaggaaaaccccatctctccatgcccaagtgagaagaggccagagactcccctctttacaaaatccctctaccctagcctacaaatgggaaatgcctctgattggttgcaggccaaagcttaccttcagcctctgattggtcgcaagccaaggcttcacttcagcctatgattggtcacaggccaatccttctttcatatagggtgttgtaaccaattggaggcctctaagggtacctaggggtgtcaccaaatttttttagtttaataaaatccctaaagcaaattgcaatcagggcttttgggccacctgctcaagcccattcccactctgtggagtgtacttttctttcaaaaaatctgtgctttcattgcttcattcttttgttgctttgtttgtgcattttgttcaattctttgttcattgcgccaagaacgtggacagctcccagtcaagactttgcattctggtaacaagtttactcattcagtctattcgcagagttttctgctctactaaaattctatctactcctcaagatccatattagtactaacacttctctgacattttaaattcagattttactgccccttcttctgtgttcaaacaacttctagttttattatactgtatttgttgcatcccattttagaaactacagtgactgggttctcagtatctgaaattcagacagttctgggatagaatatttgatcccacacaggtaaatcattcaacttgactaggtttccgtttatattctataacagggttatgattttcatctaacaacttcataaaatatttttaattggtattgcctattgtctgtgaggatacaagaaatcaggcattcaagctggtagtggttatgtaaacaggtgctaccttgcaagatggaaatccggcaataaatatcaaaagcttttcattggctgggcacggtggctcacacctgtaatcccagcactttaggaggctgaggcagggggatcacgaggtcaagagatcgagactatcatggccaacatggtgaaactccgtctctactaaaaatacaaaaattagctggaagtggtggtgcacgcctgtagtcccagctacttgggagactgaggcaggagaatcacttgaacctgggaggtggaagtagcagtgagctgagattactccactgcactccagcctggtgacagcaagactcttgtctaaaaaataaaaaaaaaaatttaaaaatttaaaaagcttttcattgttctggtccttttggtccagttatgctattctaataacgtaccctggacataatcaggatgcacttaatgatgtataaggatcatagaattatttatcatgagaacattggtaacaacctagttacctaaccatagtgggttccctgaataaattatggtgcagccactcaatagaattttatttacattgttttaaaaaagtcacaatataagacataaaaaaagcattcatgacctacaaagcattcacgatgtgtaaagtgtaaaaggaaggctataaaatcctagaataaagctacagagcaaattgcatttcccgtacttctatattacaaccaccctagcctgcaggatgccagggtaggtgcagctacactctagacttttaaaattctgaacccagagtaaatacacaatcagataatgttttcaactaaaaaagttcccccttttctctacctctttaactcttgcaacatttaccctgaagaaaaaggaaaattcttcattttataaaatttttgagccaagaatcaagaactttttttttccggctataattaatactagatttataccaagaatactaaattcggattttggggggtgagtttagactcaaaactgatggcaccaaaaagcataattcttaaaatgtatactttccagaagtacatttaaaattctcagtatttctttccatcctctactaagcaaccatgtttgtttttcctcctgtatcactcacagtaaagacgacttctttcctttgctttgtttagtttctggcaatggaataggattctttttaatatgaggttttatgtcaatcagcattatatcagtttctttgtgggttaactagatttttaggggccatctcagagcctaatctataatccagaaaaggcttcataaattgaggagcatcctacaggatcttctatcacaagccccactggtcaagggaagttttttcttgcatttcctcaagctgagactcagagaaaataacaaccccagggaaaatttcaaagatttattttctccttcactgttgaaagcaggagtttatggcatcttcgcagtggggtgaccagggtgcatctgaaccccagtgagtcaaagtctgcaggggcatgaatcctttggaaaaattctctgggcgactgtaatgtgaacatccttgttaagatgtaagggttacttcagagataaagataatgaagattatgatgccatcaccacaaccaagagacatgagactgtgctaggcatgtcaggtggatcatctcatttgatccacactcaatcaaggtgggagaataatcctaccaatagtggtaacggtaacaacagtagccaacccacatagcagatatgtgccaggctttgtttttaccattttatcaatattaacttatttaactcctacaacaaccttatgtgtgtgtgtgtgtgtgcatgtgcgtgtgtgtgtgtgtgtgtgtgtgtgtgtgtgtagattgagagagagagagagactaattccaaccctatcttctgaaaagggaactgaaacacagagatgtggaaggatttgccaaggttacataactggtaagtggcaaagccagaactgtttgaatttagtctcacgctagactcgtgtgaacgactaaaattcctcagaacaacatatttgtacttccttgtttcccatggaaaatgcaacactgcattttacatttatgctgcttagcacatatctctgatgcatgacagccattcaatacatgttctttgaattaaattttttaaaaatatatacatatttcttattttaaacaactcagtctgttaagttagttgactcctttcagtttctttcttagggagctattatgtccttttaaatataatgataaaaaactacatgtgggtatggagaactgggttcaatgaacacataatttaacgtttgtactgttaagaatcaaaccaaattaagttataaatcaaaaaccagaaccaactattttaatatggatggaaatgacccaatccatctttcttatcaaagtgcaaaatgaactcatttttaaaaatctttatttccttaacattatatagccaatacttgaacatcgaacatcgaaatagttttgaaaagaatatatttccttacttttaaacttctaggaaaacaagtacatagccacctgctcaaaactgtcaggaactttggaaggccgaggca

SEQ ID NO: 464 - DNA, 4023 bp, Homo sapiens
agctttcataaaggacaattttgttgctcatctctacaggaattagtaaaatataataaatgagggtatcaactctacatatttcatgctttgaaaagttgcaaacttttatagtaggcatgcctagcttttgcaaaaggaaaaaatgaatttttaaatgtgtttcagttaaatgtaaatgagctaaatgaatgaaagctgcagactcaataaatgtttattgccaggtaagttaaggcactttttttttttttttttgagacagtctcactctgttgcccaggctggagtgcagtggtacaatctcggttcactgcaaccttcgcctcccaggttcaagcaattctcctgcctcagcctccccagtagctgggactacaggcatgtgccaccacatccggctaattttttgcactttcagtagagacaaggtttcaccatgttagccaggatagtctcaatctcctgacctcatgatctgtccaccttggcctcccaaagtgctgggattacaggtgtgagccactgtgcctagccaaggcacttttaagccattttgcacttgtcaccatctgaagttgaaacatgaagaatccaaaaacaaaagcatttcaagttcttttatgatgctcaacagtaaagtatgcaagggctcaagtaatctgacaagcttttattagaatagggttgttgttacctataagacattttatcataaaaatattcaagcatacagaataattgaaaaaagagtaaaataaatacccatatactgacaaccagactcaacagctgttaagatgttaccatatgtgttttatctaaagagatacatttcattaattaatttttggaaccaccttcaagtaaatcatttactccaactatttgattcatttgatgtcaatagtccaaattagaaacatataaaatacactttggtagtacagtcccatgaaacccaaaaatggaatatatccatatcatcgcagtttggtcattgccactactaattaatcctataggattaactcttttaagcttctgtctcctgatcttgaaaaaatcaggaagctaaacttgagaatatccaaagtcaccataggttattaaatgttaccatttcaatacccacaggaaaactctactctcactgccctgtttgatctgcatatgaaactcggaaaaaccataagacacctggacgacagctggccagaagctgccccgtaccctaacccgcaaggatgtggacacatttctagaaatcactccagcttttaaagtaaggatgacatttggcataagtaaactattgaattattaagttgtctaatgaggtactgattctcaaccacatgcaacttcctgaaattttggtttatatgacataatttctccaatctttctctagcttcctatcaagcttactgctcagcttttagaaataagcataataggtcattaggcttccattagaagcaattacttcaaaatagagcaaatgttcccctttctttaccaccacaccgtataaggatcttccacaaagacaggccatgtaatgaagcaatctaggttttgtttcaagaattaatgcaaaacagcactcagtcattatggtcattaattcaggttattcactacctatcaaaatcacactctcaaaaaacatattatgcaaagccacttgagatttaccagaatgtttaattattattgaaattcaagaaagatcttccttcttcaagccttcccagcatctaagattactaatgtatagatttttaaaattatggctgccctaattctggattgaataaagacttcaaaatacttcatttgactagatgctgcagactcaggggctattagtcctgctctgaagacatggacccttttatgtagccccagtttgaatctaagttgtttggaaatagtatgattttactggcagagaatgtacctcaatatggaagctggctgtgtgccccaggaaagaagaaaaatgaactgaccctgcattgcagaaagacctaaggtggttagtattcaacattcttccgcctcagttgagacacacagaagtttgagttagtcactgttttcaaaacgcatttcagcagtgcatggtgagaaactcaaatgtaggtaaatattgtcattgattgttatttgttgtttttattcataggaaatttaatatttcgatttccataatactccagctctgcatagcaaattcataaacattaatacactggtcctataacagctttctaaaatatgtggaatgtaaattattcccactgtctagaagacaaaactgaggactgatatgtcacttgggtattacataagatcaaacaagtaaggaatcaaatctagatcttgtgattccaaattcagcatttttcccattatactttacttgtactgtattctaaataatttctattaaaagtacattactgtgcatattttatagatatgatttacatagcatttaacataagctgccctagatagtactaagaaaactcaaaactatcaaattctctaagataaagtagtaaatttatcacaatgaattagaattatatttccatgacttttacctaatcccatggtttcaaaatcttactgtcaatctaatattaaaaagagaaagtgttcagggttgcctagggctggggcagtgcggtgggaagaaataggaaatgactgctcatgagtgtgagggatttctttttaagaagagacaaaagtgctctaaaattagattatagtgatggctgcacaaccctgtgaacatgccaaaagcactgaattgtacattttaaaagtgacttttacatgaattatatatcaataagactattttgaaaagaaaaaaactaaagtcaaagtatatagaacttctgctttactgtactaatttttaaatctaaggaaaaattgaaatttggtttatttattcaatatttacaaatactgttttgtccacagaactagaaaacaaggtatagtcccaaattcaagagtttacaattcagaaggtcaaaaagaaataaatagctaattatagtaccaggcaaagttaaatacaagttccacaaaaataaatgcacataagatgtagtgaaagatactacagtaatctcctgggagcttaaatatggagtaccagtgggttgtgtgaccttgggcagcacaaaaaaaatatattaaagcactttaagagcaaagctctacatagatgttaaggcactgcttccctatttataaaataaggaaattggtcatttctacaatttccataaactctaatgttctacaaatctataatttaattctagacagactgacttctactgtgaattatttttcatttttgcttgaaatattgtgtaattccctcatcaactaagtcataacataaaagtataacatttttgtcactcccataccaaactgacttacatccaaaagaaggctgtttcctttaaaagaggcattctgaagaattatgtccttattttaaagatacaaatattatgcaatttcttttttagaattcctttttggaaatgctgtctgtgtttgagtatctccaatattcacaaatatttttcctttgaaaatgaactaaattttggaaacagtcaaaaagatctggcatacatagctggcaatcaaaagggcaacttttttattaatataaaaatgtaaatgaatgaactttgtagacatttatgatggacaagtacccaatgttctctgaatacaatcagcatacttttgtgctccatgtctgaggcagaagaatagggtctggagacaggcagcctaaggccaagtcatggctgagttcttggaattgggccaaaaggaaaaccccatctctccatgcccaagtgagaagaggccagagactcccctctttacaaaatccctctaccctagcctacaaatgggaaatgcctctgattggttgcaggccaaagcttaccttcagcctct

SEQ ID NO: 465 - DNA, 4042 bp, Homo sapiens
accttctagctcataggaaacactatactaatcatgcttgagattaccagtcaagtagtgaggaaatattttctgacaaattgcaaaatattattttttcaagtattttcagtttcctgggattgaataaaaccattttaaaagaatttatcataccgaagggaaggaaaagaatgaaaactagtctaacagataactaaaaacatgcagttaattcatcaaatagaatattagtgtagtgcagcccattaaatggtacttagattgcttttccttttgatgactactctggtgactatctgaaagaaattgtgtgttcactgagataatgtactcactacaaaacaatacatcattcaatgccacacttctgaggaaaaaatattttgtgaacaaaatggagaagcaggccgggcgcggtggctcacgcctgtaatcccagcactttgggaggccaaggcgggcggatcacgacgtcaggagatcgagatcattctggctaaaacggtgaaacgccgtctttactaaaaaaaatacaaaatattagccgggcgtggttgcaggtgcctgtagtcccagctactcaggaggctgaggcaggagaatggcgtgaacccgggaggcggagcttgcagtgcgccgagatcgcgccattgcacttcagcctgggtgacagagcaagactccgtctcaggaaaaaaaaaaaaaaaaaggagaagtagtgagttatatttcaagtttccttactccttaagaaatgtactatctgacggaataggtaaaataattataaatatatatgtccaatttattttgttaaatgcctcattgcacataagcaatgaagcactggcaaaatactaaattatgccaaatattattggttgtttaaaaacatactttaaaaaggtaaaagttgggccaggcatggtggctcatgcctgtaatcccagcactttgggaggccaaagcgggcagatcacctgaggttgagagttcaagaccagcctgaccaacatggagaaaccctgtctctactaaaaatacaaaattagccaggcatggtggtgcatgcctataatcccagctacttgagagaatgaggcaggagaatcgcttgaacccgggaggcggaggttgcagtgagccaagatcttgccattgcactccagcctaggcaacaagagcaaaactcagtctcaaaaaaaaaaaaaaagtaaaagtttacaatataaaaataagtctattcttacacagtatttctaacatttgtgaaaacaaatcacgggtatgctcttgctgttaagatgtaaaaattaaataagaccgcaggtatcagagaaaggagtttctgcagttcaagactgaggacaatattttacaaaattgtacatctctgctgtcaagaaagacaatttataaaggtctgagtcatgtttgctattatttcacttctcatatttctgaaattttcaggaaaaaaaagtagaaaaaaaactgcacctcaatctgtctgtaagtttctattacttacttcccagatcttcaatttgaggagatgtcccccatcttactgagactctccagccatattcacaaacgtttctcagcttttgatttctttttcagtgtcagtatatttataaaatatattttaacacttggatacaattatagaacagaatatagacaatatgaataaccaaaaaccaaatgttaaaaaaagaggatccattttcataacttagtgcagttgagacttaagttgttttcacataggatggaattaagaggaaactgggttttctcagtacaactttggttccctcaagatcatgtaaaagctagatggtccccacagaattcagaaagctttcggatatgcatgttctaataaatgtctttacatttttgatggaccctggcgcttcccaggtcccttacaagccaaggtatctgaaagactttttcttaacatccaaagggtagcaatgtcagtcttttacgataactcagaaaaggtcagaatttcttcaccatggaaaatttagcctccattccctctaaattaattttccttctttttctttctttccagagcattagtatgcctcagtgaagtatgacattattgtgttccgaatgccaagtggaataacttataaaactttttttaatagaaggaaatagaagatagagcccaaagccctcccaaatatgaaatgtgaaaagaagtaaatgagaggagaaccgatccacagtagacaaaatgaaataaaatattctacgctcttttgaaatgatgacaagcacctctctcaacatccttgattacctgttaagttaccacaattttccaatacatacgccaagctctcagcactccctgctactcctttccctcacaaaaccttttcttccttaattatgtatccccacaaattagtcatttttggaatttaaagaatgatgagccaagagtactttaagagctctctaaactaaaacttctttccaaactccctctctttcctccaatatttggaatataagctatacaataagatatcctaagatcagcattgctggagttggccaggtgaaattagtgaatgccagacaggaggttacttaggaatagttccaagtcatcttcaaaagaatagttacacacacacacacacacacacacacacacacacctctctctctcacacacacacactcactctctctttctctctctctctcttttggttttaccttcagcaatgcaacctcaaaaacttgtactccatcctcatactagaagggaatatcacttagcaggttcagctacagacaaggacagagaaggatctttccactgcaactgatatgacaccctctgctttgcctcaaccaaggtcaggggacatgaccgctaataccactgcatgtatgaagggaaggcaaagcagggaagagagaagaaccaaaaccaaaataataaaagtatcttctttcttcttcttttttttacatgcagatgaaaaaaaaatctgaaaagtcttcttggggtggttattgtgaaagagcagggctgaatgagggacaaggagggtgacagttgcagcacaggacacataagcagataaatactgaactcaagcctaatcttcaggactacaaaccgaggaaacatattaatggtatgcagagtaacttaaatatgcatataacaaactctccagctcaattctattcaataaatatttattaatgacctgttttgtatcaggatgatatggtttggctctgtgtccccatccaaatctcaccttgaattgtaataatccccacgtattgtgggaggtaactgaatcagggggaaaggtttttcccatgctgctctcataatagtgaataagtctcacgagatctgatggttttatgaaggggagttcccctcacacactctctggcccaccgccatgcaagacgtgactttgctcctcctttgccttccaccacgattgtgaggcctccccagccatgtggaactgtgagttaattaaacctctttcctttataaatcacccagtgtcaggtatgtctttattagcagggtgagaacaggctaatacacaggccctcagcaaagcatgaaaattaacaagactaagctctccttttgagtgttaatccttcctataatatatatgcttagtaactcccaatcagaatgccacttcattttttatttattttttgagatggagtctcgctctgtcacccaggctggagtgcagtggcgagatctcggctcactgcaagctccgcctcctgggttcatgccattctcctgcctcagcctcccgagtagctgggactacaggcacccaccaccacgcctggctaatttttttttgtatttttagtagagatggggtttcaccatgttagccaggatggtctcaatctcctgacctcatgatccgcctgcttcagcctcccaaagtgctgggattacaggcgtgagccactacgcccggccagaatg

SEQ ID NO: 466 - DNA, 4047 bp, Homo sapiens
cctcccacctcagcctccttgagtagccccattgccttctaaaaggattataagcaataactacaatttaatatatatcattctctcatacaagaaaaagaaaatacacataaagtatgtgtgcaacttccaaaattaattttaaataccactggtaactcagagcactatttagtaactttgattaattgaaaatcaattctgatgtaattttccaaacagatataccctagacctaactttttgctaagaaaatggatgttgtatcactatgaaattctacatacagtgacaaagacagaactatgacagacctatgttaagtgacttctttcactgttaaacaaaaattctaatgatttactacctgtgaatccctatttaaaggaagcatccaggccctagagataagcagtcccaagaggaataaaaccaatttcaccacattcaaaacaaaacactgcagtctgaaagaatgacaaaaaacatgaactattttttctatttaaatacatttcaaagaataaaaacagtatgaatacatcaacaaggatgacagatgctcaagagcttatcttccgagtataatgagcactgttttaaagaaaagtcccctgtacttcaaaattgtttcaaatgtttcaactagaaaatcattagtggtttttttaaaacagtgctctcattagataaaaagcttttcggagtttataaactacattaaccatttggggtatttcagaactaactaacatgttggaaaagaaaatttcctaaatactatcttgatatctagagctaccaaacactgaagctatacaaatacagcgtagtgtctaacaatgtctgatgcataaggttaaatatgtctcttctatgagccataattcctgaatcctcctattcactcaagttgtttaaaaggctcacgtaaagaagccataataaaactttttaaaaagatttttttaaaaattcagaaaaagaagaacattaaatcagaaagtggaggctatcgtaggcaattataattgagcacagggctcccagcaagtgtaaatgagcctggagctccctggctgccaaagctaacagaaaagcagaaattagttacatcattacccaatgtccattagggtggaggggaaaaggcaagatgttgaaacatatgccacgtacagaaaaacaccatttctttttttttttttaaacaacgtgtatgtgaatacaagtgcttgtataaaaatacataaaattttctggaaagctgtataagaaacagtggttattctgggtgtggtacttaggaagaatcccagggcaggagacgttgcacgttataacatgtatctactactatagttgctctttcaagaaacgtgcattatttcatagtgtaaaaatctatattagatttatatatagtttatattaaactataattttattttataatttagaagtataatataaatgaatgtaaaataataaagaagatagtacagggcagagtaacgtaagggccacataactacattagattctgaacatcacaatatgatagaaatcaagaagcacttggctgggcgcagtggctcacgcctgtaatcccagcactttggagggacgaggcagttagattgcttgagctcaggagtttgggagcagcctgggccacatggcaagaccctgtctctaccaaaaatacaaaaaactagccgggtgtggtggcatgcacctgtggtcccagctacttgggagaatgaggcaggaggatttcctgagcccaggcagcagaggttgcagtgagccaagatcacatcactgcacttcaggctgggtgtcaatgaagactccgtctcaaaaaacaaacaaacaaacaaacaaaaatcaagaaagaagcacgatttcaaccacctcatcacaaaatagttaccaataaaaaaaacctcaaggctactctgttacagtttgtaatcaaacttaaagatagctcaaagcagaaatccaatcatgttctttcacaagaccagtgagagagagaatgagagttcaagaaagagagaatgaacgaagaaaaaagaataaggaagatgtaaatgctatactgcaagcaactataatcccaatgtatagcactggagtgagctataaagatgactattacaatgtctgcaaatatgtattaaaatgtctggaaatatgaggaaaagaatacttctgctgctaaaatctatcttctttgttatcttcattatcaaaggaaaactttcttagagaaaccagcttaaaactattttttttttattatactttaagtcctgggatacatgtgcagaacgtgcaggattgttacataggtatacacatgtcatggcggtttgctgcgcctatcaacccatcatctacattagtaggtatttctcctaatgctctccctcccctagccccccaccccctgacaggccccagtgtgtgatgttcctctccctgtgtccatgtgttctcattgttcaactcccacttatgagtgagaacatgcagggtttggttttctgttcctgtgtgagtttgctgagaatgatggtttccagcttcatctatgtccttgcaagggacgtgaactcattttttatggctgcatagtactccatggtgtatatgtgccacattttctctaattacaagcataagaaagtatgaaacaaatcatgacggcttacacttcgatggaatagaaacttttattaaaaatttgcaacatactataccttaaaaatttccacttttaaaaatactatcactattacactcaattctagggtacttaaaattcatacatataaattataaataaacacccaaatacagtgtcaaaagtcaccacattcatatatttaaaaaaaataataattttctaagaagtcacagccaaaggaaagaatgactaggtttaaatatttcaataatgtgaattattaaattttttttaaaggcagcaggggggcctaggctgggcacgatggctcacacctgtactcccagaactttgggaggccaaggcaggcagatcacttgaagtcaggaattcaagaccagcctggccaaatggcataacgtcatctctactaaaaatacagaaattagccaggcgtggtggcatgcacctatagtcccagctactcaggaggctgaggtgggaggatctcatgaacccgagaggcagaagttgcagtgagctgatatcgtgtcactgcactccagcctgggtaacaaagtaagactccctctcaaaaaaaaaaaaaaaaaaaaaagaaaagaaaaaaaaaaaaaaagaaaaaaaaaggctagctgctaagtaatactgagaagtctatgaattcagaaaaggacattgcaggctgggcatggtggctcacgcccttaattctagcactttgggaggccaaggtgggcaaatcactgaagcctcagagttggagagcagccttggtaatgtggcgaaaccctgtatctacaaataataggaaaattagccagaggtggtggtgtgtgcctgtggtcccagctacttagtaggcagaggtgggaggatcgcttgagcccaggaggtcaaggctgtagtgagcccagatcatactacttggactctagcctgggtgacacagtaaaaccctgtctcatgtctccaaaaaaaaaaaaaaaaaaaaacacacaaataactggaggttttagattgttgattgcctttaaaaaccatttcatactaggtgacaatattcccatatatacacaaaagactaaaaacatattaacaggcctagcagttctactcaagaggaataaaaccacacaaaaacttgcacataaatgttcatagcagcattattcggaatagccaaaatatggaaacaacccaaatgcccatcgactgatgagtggacaaacaaaatgtagcctatccacacagtggaatattatttatcaatgaagagaaaggaaagtaccacaaaagctacaacatgaacaaaccttaaacacatgatc

SEQ ID NO: 467 - DNA, 4051 bp, Homo sapiens
gaatttctaaaaacgtaagagaaactcaaactctaaaagtagcattttggtatctacttaatataagcatggcatccagaatctataattaccttagggccaaggaatcatttccataatgggttatgtaaacccaaaataaaactctacatgcccccctaaccatctgaatggaccaatcctcttggccaagggcgttccagagttaacctgaaaaactagttcaggccaagatggaagagggggtcaacatgcctcattacacccctccagcattaacatcaacacagactttaagtctgatatgaaacatctgtaatctgttctctctgaagcctgctacttggaggcttccccagcaggataaaactttagtcttcacaaccccttattgtaacccagacattcttttctacattgaataattctttcaaccaataggcaatcagaaaattttcaaatctacctatgacctggaagcacccgtccctccattttgagttgtcccacccttccagatcgaaccaatgtaaatcttaaatgtattgattgatgtattatgtctccctaaaatgtataaaagcaggctgtaccccaactaccttgggtacatgtcctcaggacctcctgaggctgtgtcataggtgcatccttaaccctggcaaaataaactttttaaattaattgagaactgtctcagatattcttgggttcagagttattatcattggtaagaatgagttaggaaccctaagatacaatctagtgcacagtttgtactactaataactgatcttcctcaatttcaaaggaaaaaaatcttttatttcactttatttacttattaatctgaaataaatattctttgttcaggaacttctggtcttcaaatgaaactgataaccaaaagactgctggcattaaaaactatttcaactacaaaaattaaaaattagtatattttaggtttcaaaaacaatgaggatcacagttgagaagcagttcttttcaaaacattttaatttataatataaatattgggaccaagttggcagactttcatacaaacccctaataataacagttgttaaaacaagcatttatatagcaattttcatgagatcagagctttgaataaacaaacataaactgtactcctgattatatacctccctgctcaaatctgtaagttatgagatactctttaagggataaaaacttaacacatttttttctggcaatttctcaataaactctaaattcatgatcttagtacagaaatatataaattgaatgtacgatatcagtttaggaagacgtaaaatagagtttagacactgtaaagcttttggggttccttggtattatactaagggatacacttaatgtatcatgtttgggactggactttggcggtcctctctaatctactctttacaataattcaattccatctataatatacttgataagtatattccaatttctctttgcgcatctgacacagtggggaactacttctcattaacattagattccacaatttgttcttgatattaaggtggaggggggagatgtttccacgatatgtcttagcttcctcttgtatcacagaaccaacacattttcaaaagataatccttcctctatttgactataactatcatgatcccttggtttctctctctctctctgtctctcaatctctctctctctcaaaaccaaaaacactttgttcactgggccattttttcaaatcttaatgttgtctgcatcatctctggcacatgctggagcctttcctgggaatagcctccctctctcctgcccctgataatgcctcatggccctgtggccaagatactatcaacacattcttcagaattatctgcagacgctcttccctggaaagtctgctttggcatttcaaagctttgttaatgcccctcttccatatagaaactcccacagcaacatggcacagacagccctaacacaacacagatcaccttgtctgtttatacagcttcatgattcaaaaaaatactgaaaataaaagcaataagataagaaaaaaaaaaagtaagaagcaataagactgtgtatttgattgatcgggtgtggaaaggaagagaaacaatgtattcaagaatgatacctaaatttctggcttgggtaactgagcaagattaacaaacaagggaatatactaagggaaacagatttgagttttaaagggtctgttgaatcacgaacttgtatgtccagtgagcagttgcatataataatttagagctcagggagagttatgggatggagacaaagcaaatagattgttacagaagcctgggaagcctgggaagagtatatccagtgaaaatgaaagagatttaaggacagaaatctggaaaattagttaagtatggagcaaaggaaagtgaacaaagaaaaaaagtgaaaaaaatggccaaatgtagcaataaaattaagagtatatgacaaatcaagaggtgaggacacttgaaggagagtattgtcagtgtacaatgggacaggaagataaaattatgtaaaatctggggagaggtaagcagtaaggtcatcaaagatcttggcaatgcccatgctgttgtcactgatgcagaacatcattgccttccttttcttttatttttattattttattttattttttagaaacaaagtctcattctgtcccttaggctggagtgcagtggcaagatcatagttcactgcagccttgaagtcctgggcaatcctcccacctcagccacccaggtagctaggactacaggcatgagccattcctgactaactttttttaaaaaatttcttagagatcggggtctcgttatgttgctcatgctggtcttgaattcctggcctcaagcgatcctcccacctcagcctccttgagtagccccattgccttctaaaaggattataagcaataactacaatttaatatatatcattctctcatacaagaaaaagaaaatacacataaagtatgtgtgcaacttccaaaattaattttaaataccactggtaactcagagcactatttagtaactttgattaattgaaaatcaattctgatgtaattttccaaacagatataccctagacctaactttttgctaagaaaatggatgttgtatcactatgaaattctacatacagtgacaaagacagaactatgacagacctatgttaagtgacttctttcactgttaaacaaaaattctaatgatttactacctgtgaatccctatttaaaggaagcatccaggccctagagataagcagtcccaagaggaataaaaccaatttcaccacattcaaaacaaaacactgcagtctgaaagaatgacaaaaaacatgaactattttttctatttaaatacatttcaaagaataaaaacagtatgaatacatcaacaaggatgacagatgctcaagagcttatcttccgagtataatgagcactgttttaaagaaaagtcccctgtacttcaaaattgtttcaaatgtttcaactagaaaatcattagtggtttttttaaaacagtgctctcattagataaaaagcttttcggagtttataaactacattaaccatttggggtatttcagaactaactaacatgttggaaaagaaaatttcctaaatactatcttgatatctagagctaccaaacactgaagctatacaaatacagcgtagtgtctaacaatgtctgatgcataaggttaaatatgtctcttctatgagccataattcctgaatcctcctattcactcaagttgtttaaaaggctcacgtaaagaagccataataaaactttttaaaaagatttttttaaaaattcagaaaaagaagaacattaaatcagaaagtggaggctatcgtaggcaattataattgagcacagggctcccagcaagtgtaaatgagcctggagctccctggctgccaaagctaacagaaaagcagaaattagttacatcattacccaatgtccattag

SEQ ID NO: 468 - DNA, 4065 bp, Homo sapiens
aaatgatacaatttctttttagaaaaacactgtggaaaaatgtaactaaaacactgccagggaaaaaaatataaagtaggccctaaaaatatatgactaatatatagccaaatatataattccatatactttatattttatggctgtcataattatctccatttttagaacttcttgagattattatgatattaacagtttgtaaaactaaatcatattacatgtataataaaatatttattttcacttcttaatgagtcagataaaaatcattcatttggaataccctggtattttattcaaaaacccaattcagtttagaaaagtattgaacctatgtatgaagctcttatattttgcatctctggatccaaaatgacatgtaagcatcagccatttgaacaaatcagggagatttttccaatactaattttagagttaatttaaaatggcataagaggataaggattaggaatttttacttaacaagcatttagttctgtgcataaggtttctacataggcctacatagggttttgcttttccttcacatgtattgatttgcttcagcaattgtggattcatgcctcttattcatatatttccctgctttgcaaaagtaaatataaattagtcatacgtgattcaatattaagaagaaaaatttcccatcgattttgcctttttcaggaagatgatgaaaataattaactacattacaaatgcgacacgacagaaatatcatgaactcaattgtgcaggtaaagcaattttaaaaaacgtgtgcatgtttctagaagaatatagtgctgcaatttttgatccagtctcaggaccacctcagcaaaattaacaaatttttttttttttttgagatggtgtttcactcttgtccaggctggagtgcaatggcatggtctgggctcattgtaacctccaccgcccgggttcaagcgattctcctgcctcagcctctcaagtagctgggattacaggtgcctgcccccatgcctggctaatttttgtatttttagtagagatggggtttcaccatgttggccgggctggtcttgaactcctgacctcaggtgatctgcccgcctcagcctcccaaagtgctgggattacaggcatgaaccaccgtgcccggcccaattaacacaaatttttaacaaaacaaaactatttacaaaataaataaaaatctgaacaacatgactatccaatacaacctactctcttacaggaaaacgttaaactcttttcttcttgttttactcaaatgtaatattttaaaccttaacttatactttggatacttacagtctccttaaaatacattattttccattcctctctgatagaccataatctaaactttcacctttaaagtcccccctaccaacttccatgactctttctctagttttaaaatgataaccactcatgtatgttactttctagtctccatcattttctgatagagacatgagctgttgactacccagtacctttaagtttagccttgaacttttctctcatgcaccggtaggttttccaggacaatctattataaaatagtagatactactataaaatagtagctatatagatactataaaataacaataataactccaggaaaaatatcctgaagatcaggatgaaaggaagactgaagcagaggatttgggattctgataaactccatggaaaaataaaaagtttatgtaaactcagaaggagcaaaaaagtattaaattaggctcatggtcaaaatttctctgattatgtaaaatctatttgagaagcacatccaataatatattttacagtcagaaatataatctacccagggaaatcaatattaaaaaaccataccaatatttattcccccaattctagggaagactatatagtcaaaataaaacaaccgccctactggggaaaaaaaatctcctccttcttgggctggggagactgtgtcactattttgtaatttccccaaaataaagaaggcattacaaattaaatagttaagaaaacgtgacgttgtagagtcccctgagagagtagaggaggtggacagatttgtgacattttatctctagacgaactttcctgtcactagtacaaaacaggaggaatggagccatttgcagcacaacttatctgaacaaggggaaggcaagcacaaaacttctcaaaaatccctcaaaatgtattacttttgcctcttgggattagagttagaaaaacaaaagattgcaaacacaaaaaaagaagatattaaggtgacaatgaaatcagattatcagaaaatgaaaaagaaatggcttgaaataagatctaaacatgacaaggacaactaagacaaaaaattaggctttatacaacgaatataatctctgtggacccacactacatattaaatccacacctgttaattttgctggctcataatactgggtatttgtataagtagtctaaattaaaggaaaattagccataataaaaagagaagttcagaccacgcttttgcagctttttaactgggtcaaaattggccagcccaaacacagacagtaattaagaaaatatcatcatcttttcaaaaagggacatacactctatgccttgtttgagatctcattaacttggaataagttctagtcaaagacaaacaggttttacataccttactagattttaattatagctaaatatagttgctaatttcatattcatgtaaacacttgcattgcctgtgtcaagattcctcagcaatatttctgtgaactgaaaagcataaagtcaaccaatcactaatcaaccgctttattcatggcaatattattcgggtcttgagtattttttccttaataacgagttctactcaattgaatttctaaaaacgtaagagaaactcaaactctaaaagtagcattttggtatctacttaatataagcatggcatccagaatctataattaccttagggccaaggaatcatttccataatgggttatgtaaacccaaaataaaactctacatgcccccctaaccatctgaatggaccaatcctcttggccaagggcgttccagagttaacctgaaaaactagttcaggccaagatggaagagggggtcaacatgcctcattacacccctccagcattaacatcaacacagactttaagtctgatatgaaacatctgtaatctgttctctctgaagcctgctacttggaggcttccccagcaggataaaactttagtcttcacaaccccttattgtaacccagacattcttttctacattgaataattctttcaaccaataggcaatcagaaaattttcaaatctacctatgacctggaagcacccgtccctccattttgagttgtcccacccttccagatcgaaccaatgtaaatcttaaatgtattgattgatgtattatgtctccctaaaatgtataaaagcaggctgtaccccaactaccttgggtacatgtcctcaggacctcctgaggctgtgtcataggtgcatccttaaccctggcaaaataaactttttaaattaattgagaactgtctcagatattcttgggttcagagttattatcattggtaagaatgagttaggaaccctaagatacaatctagtgcacagtttgtactactaataactgatcttcctcaatttcaaaggaaaaaaatcttttatttcactttatttacttattaatctgaaataaatattctttgttcaggaacttctggtcttcaaatgaaactgataaccaaaagactgctggcattaaaaactatttcaactacaaaaattaaaaattagtatattttaggtttcaaaaacaatgaggatcacagttgagaagcagttcttttcaaaacattttaatttataatataaatattgggaccaagttggcagactttcatacaaacccctaataataacagttgttaaaacaagcatttatatagcaattttcatgagatcagagctttgaataaacaaacataaactgtactcctgatt

SEQ ID NO: 469 - DNA, 4043 bp, Homo sapiens
accagaacttctaactctgccaataaaatggcttgaagctgaggcaggttaggaacccctggtatctgacctagacttttaagactaatagcagcaattacaatacaaaagtccagctattgcccacaattactgcctctcagggggtctaagtaatgaattattcatgtaacatatgctctatacctttaaaggaagaaacagacaaatctatacaaaacaagctaacagacctctttatggtcataaagtttgtcacctgctgttaccagctgccataaggaagatattccttgccttccccgccccttctaagtggagagcaagctgagggagaaccgtcttttactctcaggaatttagatgcttaaccacatattaaagcgagaggtcgaagtccgccctgtgttacaagcctaatccttacattacagtagaggtgcagagagagattgggagaagcaactgcagccaggagggagcaaagagctaaattcttctctctccacattcatcccaccataacgttcctatcatcaaaaggcaagcagtgactgcaattgttttggaaaagcttccaaacttttcagatggcatgatgttgcatcttttccctctggcaattgtggtttgtaagaaaaagcccattattcttttaatgactcaatccagtcccgcttctacagtatttgtacttgcaatgatccatggggcattcacggtgaaagccactgagcacagctttttaaatattaataattgacttacataccaagtgagggaggacttcacccctttctgcctttctttttctttaaagactggaaattggaagaagattggtgtttggcatccaaaggctaaagagggcaggagcgcatacacgcatgtggaggttttctgttttaactataaatgtaaggtagtatttggcaggctagactccatctagattgtgccaggagccttcctatggaaaaaagagctacacgcacatttaataatccaagcattaaagcttcacagtgcatgcaagcactccatgtttaaaacagacacgctcagataaaaagcctgaggtcagatgtgccactgtcactgtgaagcgacttctgccacccacagctgagtccccaggcagagggctgtacagggcagtgcacggcaggcagtggctggacagataaacctgaggggtatggagaacagaacccatgcctacgaagtcagactttggcaccaatacccagtgttttttgctggatttttattttattttcattttcttttttttttctccaaagaagtttcagttaaattaccagctgacttgagtacaaagagtttcttctgatgtggaattctaaaagtgacaggcatcatgagaagccctcctgaccaaaggaagtaattgctaattagccctttacttgaaaaacatctttaaaggagacagcaaaattgaatattccttataaattatactaaaccaccaaagagtcaatagagcatctatctaaatgtatagtgaaaaaaaaggcaagaaagaaaggaaaaaagtacattcatgaagtttgctttctgcataccttttcaaattttgtcagcagttcccgtaagttgaagttcagaccaatcattgtccagtagcccttgaagcctacatctttccggcaaacttccttcagacaacagcgtttaacttctaaacaccgtatcttttctggctatactttaaaatcctttgtaaaatcctttacaagccttgcccttgagctatggtccatcagcagcagcggcagcttgcgctgggacattttagccaccccactgtgggtccgttttttcatggacttcggagttcgcaaggaatagacctgcttctgtatttcctggtagctgtgttccacgaggctggcatggtctcctctttctctgggaagtccaggattcccttctgctcacctcactaatgacctgcaggccacaactgttctctccagggccccaagcttagagtttggtctcaattacatacagcaaaaaaagaagctatatcctggaaacttgcatgagagaagaaaaaaaaaaagccaagtattaccaacttcctccattcagaccgatttcagaacgaaaaaaaaaaaatcctgggtaaagagccagttttcaaagagcatgacttatgtagagttcgaaggaggagtgtactcttagctgaagaaacaccaaaacacaggacaagaggccaccggttctcactctcccagacaccagcagcctgggttgctatggtaaccaccaagctagtttcagtccatttccctaggtcagcctggcctaagggatgctgtcaatgcaacagaactaaacttgttttaaaaggtgttctgtctgtccagagaaaagctctcgcagcaaatctagtcccttctgccggctttgtggcaggggagagcagcctcagtgggctctggcagctcccctggctgatctgacagcagtgtggtaatcaacttctctttccagcagttgtttattattttaatcagcatcctccctttccaccacccctcacccagtttgaagtgaaagctcactcccacttcctggaggcctgcctgccccaaaagtcagttctctatcttttacattgtctcaatcttgaatggatcacaggttccatgttccagttgggagccaacccatgaaaagaaaagggagtgaatgtacaaaacaatacaaatcacaaaaggaaatacgcgttgattaattttatttttcaaaaaggtgttagcaggcaactgatgaagaaaatagttttaaagtgtttcgatctctttgatgccgctgaaagtcattcagactgttttcttatagggaatttacttgtttctgacataaaacttaatgagagaaactactgtactcaaaatgtgagtaataactacattgaatgtgtcttccattttgatgttaaattactactggcactcagagaaacaccatcttccaggaagttttaagtgtcatcgctttaaagaaaaaaactccaatccaaattataaattctttgtagtgatattatggatatcattccaaggcaaatgtgattttgcttttgcattacatagctatacagtataccaataaagtataacagaaatgtccatttgaaacatgtttctctagttgtaggcagagtttcatcataaagatgcagtgcttataatggtgacactaccacaagtagaataatgtaaattttaatataagtaagtttactttttttgcatcagggcatagaccaaagtgggggggggaacccctaaaatcagaatatgcatctcctaaagggctaatgagttgcttaaatatcaataccgttagcacttatttaatcatgggtcgtaagagattccatttaaaaccagaaaaactaaaaatctatcagggaacagtatacaatgttggtattattttttggatttgcaaatcatttttctttctatttcattcctaacttattttcatatcagtatttaaatagcatgtgttttacatatgcccatctatacaaattttaacaagcttttaaaatattttcattattttttcataaaaacctgtatgtccccaggggcaaaatggctttatgagctttctagcagaacgtgtttcacctcaacgcacatttgatttcaaaaacaaatgtgttaatctaatgcttattcagaaattcacaggtaaaaataatctacagtttggatcaaaacagcactgacatcagcatgaagaccaaccatcagaactgtggtgaagaaacttacagagaaagtggccacagggaacctggtctgtaaagactctggggccacatgctgagatctttcaagagcagcaaataaactttttacataaatacaagacaaaagaaaccaccagcaccagcaccatcaccaccaccacacacacaaaaaaataaataaataaaaaagggagagaaaaagaacaatctttctcagctgggcaaacttccagct

SEQ ID NO: 470 - DNA, 4045 bp, Homo sapiens
cacataggtttttataaaactgcctaacacaaaaatacacatatatggagaacttcagactgagaattacatcaggactgtttctttgagttcgccttttgtctcaaaaataaataaataaataaatagataataataataataaaaatcccaaatcaagcctttgacaggaaaaagccagtagatatcttctactgtcaattcaactactaaaataggaataagacaaatactaagacatgggagttaaaaggggaaacatgctaatataaccagaacttctaactctgccaataaaatggcttgaagctgaggcaggttaggaacccctggtatctgacctagacttttaagactaatagcagcaattacaatacaaaagtccagctattgcccacaattactgcctctcagggggtctaagtaatgaattattcatgtaacatatgctctatacctttaaaggaagaaacagacaaatctatacaaaacaagctaacagacctctttatggtcataaagtttgtcacctgctgttaccagctgccataaggaagatattccttgccttccccgccccttctaagtggagagcaagctgagggagaaccgtcttttactctcaggaatttagatgcttaaccacatattaaagcgagaggtcgaagtccgccctgtgttacaagcctaatccttacattacagtagaggtgcagagagagattgggagaagcaactgcagccaggagggagcaaagagctaaattcttctctctccacattcatcccaccataacgttcctatcatcaaaaggcaagcagtgactgcaattgttttggaaaagcttccaaacttttcagatggcatgatgttgcatcttttccctctggcaattgtggtttgtaagaaaaagcccattattcttttaatgactcaatccagtcccgcttctacagtatttgtacttgcaatgatccatggggcattcacggtgaaagccactgagcacagctttttaaatattaataattgacttacataccaagtgagggaggacttcacccctttctgcctttctttttctttaaagactggaaattggaagaagattggtgtttggcatccaaaggctaaagagggcaggagcgcatacacgcatgtggaggttttctgttttaactataaatgtaaggtagtatttggcaggctagactccatctagattgtgccaggagccttcctatggaaaaaagagctacacgcacatttaataatccaagcattaaagcttcacagtgcatgcaagcactccatgtttaaaacagacacgctcagataaaaagcctgaggtcagatgtgccactgtcactgtgaagcgacttctgccacccacagctgagtccccaggcagagggctgtacagggcagtgcacggcaggcagtggctggacagataaacctgaggggtatggagaacagaacccatgcctacgaagtcagactttggcaccaatacccagtgttttttgctggatttttattttattttcattttcttttttttttctccaaagaagtttcagttaaattaccagctgacttgagtacaaagagtttcttctgatgtggaattctaaaagtgacaggcatcatgagaagccctcctgaccaaaggaagtaattgctaattagccctttacttgaaaaacatctttaaaggagacagcaaaattgaatattccttataaattatactaaaccaccaaagagtcaatagagcatctatctaaatgtatagtgaaaaaaaaggcaagaaagaaaggaaaaaagtacattcatgaagtttgctttctgcataccttttcaaattttgtcagcagttcccgtaagttgaagttcagaccaatcattgtccagtagcccttgaagcctacatctttccggcaaacttccttcagacaacagcgtttaacttctaaacaccgtatcttttctggctatactttaaaatcctttgtaaaatcctttacaagccttgcccttgagctatggtccatcagcagcagcggcagcttgcgctgggacattttagccaccccactgtgggtccgttttttcatggacttcggagttcgcaaggaatagacctgcttctgtatttcctggtagctgtgttccacgaggctggcatggtctcctctttctctgggaagtccaggattcccttctgctcacctcactaatgacctgcaggccacaactgttctctccagggccccaagcttagagtttggtctcaattacatacagcaaaaaaagaagctatatcctggaaacttgcatgagagaagaaaaaaaaaaagccaagtattaccaacttcctccattcagaccgatttcagaacgaaaaaaaaaaaatcctgggtaaagagccagttttcaaagagcatgacttatgtagagttcgaaggaggagtgtactcttagctgaagaaacaccaaaacacaggacaagaggccaccggttctcactctcccagacaccagcagcctgggttgctatggtaaccaccaagctagtttcagtccatttccctaggtcagcctggcctaagggatgctgtcaatgcaacagaactaaacttgttttaaaaggtgttctgtctgtccagagaaaagctctcgcagcaaatctagtcccttctgccggctttgtggcaggggagagcagcctcagtgggctctggcagctcccctggctgatctgacagcagtgtggtaatcaacttctctttccagcagttgtttattattttaatcagcatcctccctttccaccacccctcacccagtttgaagtgaaagctcactcccacttcctggaggcctgcctgccccaaaagtcagttctctatcttttacattgtctcaatcttgaatggatcacaggttccatgttccagttgggagccaacccatgaaaagaaaagggagtgaatgtacaaaacaatacaaatcacaaaaggaaatacgcgttgattaattttatttttcaaaaaggtgttagcaggcaactgatgaagaaaatagttttaaagtgtttcgatctctttgatgccgctgaaagtcattcagactgttttcttatagggaatttacttgtttctgacataaaacttaatgagagaaactactgtactcaaaatgtgagtaataactacattgaatgtgtcttccattttgatgttaaattactactggcactcagagaaacaccatcttccaggaagttttaagtgtcatcgctttaaagaaaaaaactccaatccaaattataaattctttgtagtgatattatggatatcattccaaggcaaatgtgattttgcttttgcattacatagctatacagtataccaataaagtataacagaaatgtccatttgaaacatgtttctctagttgtaggcagagtttcatcataaagatgcagtgcttataatggtgacactaccacaagtagaataatgtaaattttaatataagtaagtttactttttttgcatcagggcatagaccaaagtgggggggggaacccctaaaatcagaatatgcatctcctaaagggctaatgagttgcttaaatatcaataccgttagcacttatttaatcatgggtcgtaagagattccatttaaaaccagaaaaactaaaaatctatcagggaacagtatacaatgttggtattattttttggatttgcaaatcatttttctttctatttcattcctaacttattttcatatcagtatttaaatagcatgtgttttacatatgcccatctatacaaattttaacaagcttttaaaatattttcattattttttcataaaaacctgtatgtccccaggggcaaaatggctttatgagctttctagcagaacgtgtttcacctcaacgcacatttgatttcaaaaacaaatgtgttaatctaatgcttattcagaaattcacaggtaaaaataatctacagtttggatcaaa

SEQ ID NO: 471 - DNA, 4046 bp, Homo sapiens
caacatctcaatatatgagacagattttgtaagaatacgcaaaggattttattaacactttggaaagaatacattcatgtacgacaacttcctagaagtaaaatacggccaaagagatcaactttcacataggtttttataaaactgcctaacacaaaaatacacatatatggagaacttcagactgagaattacatcaggactgtttctttgagttcgccttttgtctcaaaaataaataaataaataaatagataataataataataaaaatcccaaatcaagcctttgacaggaaaaagccagtagatatcttctactgtcaattcaactactaaaataggaataagacaaatactaagacatgggagttaaaaggggaaacatgctaatataaccagaacttctaactctgccaataaaatggcttgaagctgaggcaggttaggaacccctggtatctgacctagacttttaagactaatagcagcaattacaatacaaaagtccagctattgcccacaattactgcctctcagggggtctaagtaatgaattattcatgtaacatatgctctatacctttaaaggaagaaacagacaaatctatacaaaacaagctaacagacctctttatggtcataaagtttgtcacctgctgttaccagctgccataaggaagatattccttgccttccccgccccttctaagtggagagcaagctgagggagaaccgtcttttactctcaggaatttagatgcttaaccacatattaaagcgagaggtcgaagtccgccctgtgttacaagcctaatccttacattacagtagaggtgcagagagagattgggagaagcaactgcagccaggagggagcaaagagctaaattcttctctctccacattcatcccaccataacgttcctatcatcaaaaggcaagcagtgactgcaattgttttggaaaagcttccaaacttttcagatggcatgatgttgcatcttttccctctggcaattgtggtttgtaagaaaaagcccattattcttttaatgactcaatccagtcccgcttctacagtatttgtacttgcaatgatccatggggcattcacggtgaaagccactgagcacagctttttaaatattaataattgacttacataccaagtgagggaggacttcacccctttctgcctttctttttctttaaagactggaaattggaagaagattggtgtttggcatccaaaggctaaagagggcaggagcgcatacacgcatgtggaggttttctgttttaactataaatgtaaggtagtatttggcaggctagactccatctagattgtgccaggagccttcctatggaaaaaagagctacacgcacatttaataatccaagcattaaagcttcacagtgcatgcaagcactccatgtttaaaacagacacgctcagataaaaagcctgaggtcagatgtgccactgtcactgtgaagcgacttctgccacccacagctgagtccccaggcagagggctgtacagggcagtgcacggcaggcagtggctggacagataaacctgaggggtatggagaacagaacccatgcctacgaagtcagactttggcaccaatacccagtgttttttgctggatttttattttattttcattttcttttttttttctccaaagaagtttcagttaaattaccagctgacttgagtacaaagagtttcttctgatgtggaattctaaaagtgacaggcatcatgagaagccctcctgaccaaaggaagtaattgctaattagccctttacttgaaaaacatctttaaaggagacagcaaaattgaatattccttataaattatactaaaccaccaaagagtcaatagagcatctatctaaatgtatagtgaaaaaaaaggcaagaaagaaaggaaaaaagtacattcatgaagtttgctttctgcataccttttcaaattttgtcagcagttcccgtaagttgaagttcagaccaatcattgtccagtagcccttgaagcctacatctttccggcaaacttccttcagacaacagcgtttaacttctaaacaccgtatcttttctggctatactttaaaatcctttgtaaaatcctttacaagccttgcccttgagctatggtccatcagcagcagcggcagcttgcgctgggacattttagccaccccactgtgggtccgttttttcatggacttcggagttcgcaaggaatagacctgcttctgtatttcctggtagctgtgttccacgaggctggcatggtctcctctttctctgggaagtccaggattcccttctgctcacctcactaatgacctgcaggccacaactgttctctccagggccccaagcttagagtttggtctcaattacatacagcaaaaaaagaagctatatcctggaaacttgcatgagagaagaaaaaaaaaaagccaagtattaccaacttcctccattcagaccgatttcagaacgaaaaaaaaaaaatcctgggtaaagagccagttttcaaagagcatgacttatgtagagttcgaaggaggagtgtactcttagctgaagaaacaccaaaacacaggacaagaggccaccggttctcactctcccagacaccagcagcctgggttgctatggtaaccaccaagctagtttcagtccatttccctaggtcagcctggcctaagggatgctgtcaatgcaacagaactaaacttgttttaaaaggtgttctgtctgtccagagaaaagctctcgcagcaaatctagtcccttctgccggctttgtggcaggggagagcagcctcagtgggctctggcagctcccctggctgatctgacagcagtgtggtaatcaacttctctttccagcagttgtttattattttaatcagcatcctccctttccaccacccctcacccagtttgaagtgaaagctcactcccacttcctggaggcctgcctgccccaaaagtcagttctctatcttttacattgtctcaatcttgaatggatcacaggttccatgttccagttgggagccaacccatgaaaagaaaagggagtgaatgtacaaaacaatacaaatcacaaaaggaaatacgcgttgattaattttatttttcaaaaaggtgttagcaggcaactgatgaagaaaatagttttaaagtgtttcgatctctttgatgccgctgaaagtcattcagactgttttcttatagggaatttacttgtttctgacataaaacttaatgagagaaactactgtactcaaaatgtgagtaataactacattgaatgtgtcttccattttgatgttaaattactactggcactcagagaaacaccatcttccaggaagttttaagtgtcatcgctttaaagaaaaaaactccaatccaaattataaattctttgtagtgatattatggatatcattccaaggcaaatgtgattttgcttttgcattacatagctatacagtataccaataaagtataacagaaatgtccatttgaaacatgtttctctagttgtaggcagagtttcatcataaagatgcagtgcttataatggtgacactaccacaagtagaataatgtaaattttaatataagtaagtttactttttttgcatcagggcatagaccaaagtgggggggggaacccctaaaatcagaatatgcatctcctaaagggctaatgagttgcttaaatatcaataccgttagcacttatttaatcatgggtcgtaagagattccatttaaaaccagaaaaactaaaaatctatcagggaacagtatacaatgttggtattattttttggatttgcaaatcatttttctttctatttcattcctaacttattttcatatcagtatttaaatagcatgtgttttacatatgcccatctatacaaattttaacaagcttttaaaatattttcattattttttcataaaaacctgtatgtccccaggggcaaaatg

SEQ ID NO: 472 - DNA, 4035 bp, Homo sapiens
cttctgcattatagcagtaggccttggtctttccctagaaatggcattattgctttgttgggggaaggtggttagttgtatttgagacgtgtgaggtactgatacttttccgtaattccagttttcctgccaataaaccaatgaagcaacatctcaatatatgagacagattttgtaagaatacgcaaaggattttattaacactttggaaagaatacattcatgtacgacaacttcctagaagtaaaatacggccaaagagatcaactttcacataggtttttataaaactgcctaacacaaaaatacacatatatggagaacttcagactgagaattacatcaggactgtttctttgagttcgccttttgtctcaaaaataaataaataaataaatagataataataataataaaaatcccaaatcaagcctttgacaggaaaaagccagtagatatcttctactgtcaattcaactactaaaataggaataagacaaatactaagacatgggagttaaaaggggaaacatgctaatataaccagaacttctaactctgccaataaaatggcttgaagctgaggcaggttaggaacccctggtatctgacctagacttttaagactaatagcagcaattacaatacaaaagtccagctattgcccacaattactgcctctcagggggtctaagtaatgaattattcatgtaacatatgctctatacctttaaaggaagaaacagacaaatctatacaaaacaagctaacagacctctttatggtcataaagtttgtcacctgctgttaccagctgccataaggaagatattccttgccttccccgccccttctaagtggagagcaagctgagggagaaccgtcttttactctcaggaatttagatgcttaaccacatattaaagcgagaggtcgaagtccgccctgtgttacaagcctaatccttacattacagtagaggtgcagagagagattgggagaagcaactgcagccaggagggagcaaagagctaaattcttctctctccacattcatcccaccataacgttcctatcatcaaaaggcaagcagtgactgcaattgttttggaaaagcttccaaacttttcagatggcatgatgttgcatcttttccctctggcaattgtggtttgtaagaaaaagcccattattcttttaatgactcaatccagtcccgcttctacagtatttgtacttgcaatgatccatggggcattcacggtgaaagccactgagcacagctttttaaatattaataattgacttacataccaagtgagggaggacttcacccctttctgcctttctttttctttaaagactggaaattggaagaagattggtgtttggcatccaaaggctaaagagggcaggagcgcatacacgcatgtggaggttttctgttttaactataaatgtaaggtagtatttggcaggctagactccatctagattgtgccaggagccttcctatggaaaaaagagctacacgcacatttaataatccaagcattaaagcttcacagtgcatgcaagcactccatgtttaaaacagacacgctcagataaaaagcctgaggtcagatgtgccactgtcactgtgaagcgacttctgccacccacagctgagtccccaggcagagggctgtacagggcagtgcacggcaggcagtggctggacagataaacctgaggggtatggagaacagaacccatgcctacgaagtcagactttggcaccaatacccagtgttttttgctggatttttattttattttcattttcttttttttttctccaaagaagtttcagttaaattaccagctgacttgagtacaaagagtttcttctgatgtggaattctaaaagtgacaggcatcatgagaagccctcctgaccaaaggaagtaattgctaattagccctttacttgaaaaacatctttaaaggagacagcaaaattgaatattccttataaattatactaaaccaccaaagagtcaatagagcatctatctaaatgtatagtgaaaaaaaaggcaagaaagaaaggaaaaaagtacattcatgaagtttgctttctgcataccttttcaaattttgtcagcagttcccgtaagttgaagttcagaccaatcattgtccagtagcccttgaagcctacatctttccggcaaacttccttcagacaacagcgtttaacttctaaacaccgtatcttttctggctatactttaaaatcctttgtaaaatcctttacaagccttgcccttgagctatggtccatcagcagcagcggcagcttgcgctgggacattttagccaccccactgtgggtccgttttttcatggacttcggagttcgcaaggaatagacctgcttctgtatttcctggtagctgtgttccacgaggctggcatggtctcctctttctctgggaagtccaggattcccttctgctcacctcactaatgacctgcaggccacaactgttctctccagggccccaagcttagagtttggtctcaattacatacagcaaaaaaagaagctatatcctggaaacttgcatgagagaagaaaaaaaaaaagccaagtattaccaacttcctccattcagaccgatttcagaacgaaaaaaaaaaaatcctgggtaaagagccagttttcaaagagcatgacttatgtagagttcgaaggaggagtgtactcttagctgaagaaacaccaaaacacaggacaagaggccaccggttctcactctcccagacaccagcagcctgggttgctatggtaaccaccaagctagtttcagtccatttccctaggtcagcctggcctaagggatgctgtcaatgcaacagaactaaacttgttttaaaaggtgttctgtctgtccagagaaaagctctcgcagcaaatctagtcccttctgccggctttgtggcaggggagagcagcctcagtgggctctggcagctcccctggctgatctgacagcagtgtggtaatcaacttctctttccagcagttgtttattattttaatcagcatcctccctttccaccacccctcacccagtttgaagtgaaagctcactcccacttcctggaggcctgcctgccccaaaagtcagttctctatcttttacattgtctcaatcttgaatggatcacaggttccatgttccagttgggagccaacccatgaaaagaaaagggagtgaatgtacaaaacaatacaaatcacaaaaggaaatacgcgttgattaattttatttttcaaaaaggtgttagcaggcaactgatgaagaaaatagttttaaagtgtttcgatctctttgatgccgctgaaagtcattcagactgttttcttatagggaatttacttgtttctgacataaaacttaatgagagaaactactgtactcaaaatgtgagtaataactacattgaatgtgtcttccattttgatgttaaattactactggcactcagagaaacaccatcttccaggaagttttaagtgtcatcgctttaaagaaaaaaactccaatccaaattataaattctttgtagtgatattatggatatcattccaaggcaaatgtgattttgcttttgcattacatagctatacagtataccaataaagtataacagaaatgtccatttgaaacatgtttctctagttgtaggcagagtttcatcataaagatgcagtgcttataatggtgacactaccacaagtagaataatgtaaattttaatataagtaagtttactttttttgcatcagggcatagaccaaagtgggggggggaacccctaaaatcagaatatgcatctcctaaagggctaatgagttgcttaaatatcaataccgttagcacttatttaatcatgggtcgtaagagattccatttaaaaccagaaaaactaaaaatctatcagggaacagtatacaatgttggtattattttttggatttgc

SEQ ID NO: 473 - DNA, 4047 bp, Homo sapiens
aatataggtaagactcgaggtgggtggatagcttgagcccaggagttcaaggtcagcctgagcaacacagcaagtccatgtctccaaaaaaaaaaaaaaagtaagacaacagagtagaaaacagtcaaattactaagtggaacaaactcagatagtgtgatgaaaactgaacaaacaaatcagatcgtgtaatcaaaactgaacaggtcagaaaacccagagaaaaattatcgcatttcaaatgtttaaaactacaagcctggggcacacagcttctcaacttctgacccatgtcaaagcagtccctgttaccctgaaagctcccaatttcttcccctgacacaagtccacccatgggccacacacatgcacacacattggtatataatctcatttccttctttcaacttaaactcatctgttaagtctcagtttaaatgtaatttctccaggagagacttcacaagtactgagattagggctatcattactcttataatttcatctacttttgcttaattatgcagttgtcattgaaaatgtccttgtctgtatcctcccattcggccataagatcaatgtcttctccatctatacacttagactagcacctggtacatacttcacaaatatttgctaagtagggaataaatgaggagactttgaaatgtgtttactatatcttattgaggacacatttgttttaaaatgagatatggcaaactgagcaatacaatatagcttcaaattgtaattataaaagatagagtcatgtgaaaggaggtaaatgccataaagtaattcagcattgagtggtttctctctgtgttgttatgataggaagcatctttgcccaaggagtcaccaagagaatggtactaagagaacggcactcacacacacagcagacacatacatcaaaaaatcccttagagaactacgattatcattaaccattcagtagcaggtctgaataaattaataaaaggcagcagtcactcaaaatgtcactgagctaaaattggccattacactatcctctgtgactattaaacaaaagaaatacagtacacaatgcaaatggcttaagtatgacagtatgttaatagtccctaaagtcatgagatacttcctttaggaagtactttcagggaaaaaaattaattaaaatcagcgtggcaaataaaactacctattggctggatctcagagaggtgtgttggtggactagtcaactttgaatgtgaactcttcccatagtcacccttgagcccatggccacaacttctcatcccttatcactttgttagatgattaggacctgcttgctggcaggcacatcttggtatggggtcatcctcccctggtaagaagttcttcctctttaggtaccactcgagttggcatggttccctccaattgggccttcctaatctgtaatgagctgtcatcttgtaggaacataatacttcctgcctgcaagagactcctagccttgccctttctggttctagaagactagaaatcagtacccaatgtaagaaattgcccatcctgcctgtgctgggaaactacaatcccagcatcacacatgctgagacaaggtgctcaaccacatgccaaacattcttatatgagtataacatgccaaacattcttatatccagtaaaaatcacaaaaccactggatgtctccaaaattcaaaaatatcaactaaaatatccctttcaatttaccttcacaaaaaaactgctgtcttaaagttatgctgaaggtctgctttcacctgggaattttaatgatctgaccagtctataactttccagattagccaccattggaaggcctgctgctcagctgttggcctcaactactaagcgtatcaggatttgagtctactagtccaacagtggaccctcgttttcttaaagcctgaaattccttcaggaatacagcaaaatcccctttctactgtggtcacctaaacttcagactgaacaatgacaactgctgatatgaaaagtggtaaatcgttaaggctagtattctctctagaaacaggttactaatactgaggaagagacaggactgagaattgagggtaaagggactctacctctgcgtgtagaatggctgttactcagcttctgaagggatcctgtggcttctgcattatagcagtaggccttggtctttccctagaaatggcattattgctttgttgggggaaggtggttagttgtatttgagacgtgtgaggtactgatacttttccgtaattccagttttcctgccaataaaccaatgaagcaacatctcaatatatgagacagattttgtaagaatacgcaaaggattttattaacactttggaaagaatacattcatgtacgacaacttcctagaagtaaaatacggccaaagagatcaactttcacataggtttttataaaactgcctaacacaaaaatacacatatatggagaacttcagactgagaattacatcaggactgtttctttgagttcgccttttgtctcaaaaataaataaataaataaatagataataataataataaaaatcccaaatcaagcctttgacaggaaaaagccagtagatatcttctactgtcaattcaactactaaaataggaataagacaaatactaagacatgggagttaaaaggggaaacatgctaatataaccagaacttctaactctgccaataaaatggcttgaagctgaggcaggttaggaacccctggtatctgacctagacttttaagactaatagcagcaattacaatacaaaagtccagctattgcccacaattactgcctctcagggggtctaagtaatgaattattcatgtaacatatgctctatacctttaaaggaagaaacagacaaatctatacaaaacaagctaacagacctctttatggtcataaagtttgtcacctgctgttaccagctgccataaggaagatattccttgccttccccgccccttctaagtggagagcaagctgagggagaaccgtcttttactctcaggaatttagatgcttaaccacatattaaagcgagaggtcgaagtccgccctgtgttacaagcctaatccttacattacagtagaggtgcagagagagattgggagaagcaactgcagccaggagggagcaaagagctaaattcttctctctccacattcatcccaccataacgttcctatcatcaaaaggcaagcagtgactgcaattgttttggaaaagcttccaaacttttcagatggcatgatgttgcatcttttccctctggcaattgtggtttgtaagaaaaagcccattattcttttaatgactcaatccagtcccgcttctacagtatttgtacttgcaatgatccatggggcattcacggtgaaagccactgagcacagctttttaaatattaataattgacttacataccaagtgagggaggacttcacccctttctgcctttctttttctttaaagactggaaattggaagaagattggtgtttggcatccaaaggctaaagagggcaggagcgcatacacgcatgtggaggttttctgttttaactataaatgtaaggtagtatttggcaggctagactccatctagattgtgccaggagccttcctatggaaaaaagagctacacgcacatttaataatccaagcattaaagcttcacagtgcatgcaagcactccatgtttaaaacagacacgctcagataaaaagcctgaggtcagatgtgccactgtcactgtgaagcgacttctgccacccacagctgagtccccaggcagagggctgtacagggcagtgcacggcaggcagtggctggacagataaacctgaggggtatggagaacagaacccatgcctacgaagtcagactttggcaccaatacccagtgttttttgctggatttttattttattttcattttcttttttttttctccaaagaagtttcagttaaattaccagctgacttgagtacaa

SEQ ID NO: 474 - DNA, 4029 bp, Homo sapiens
ttatgactaagaccccaaaagcaaatgcaaatgtagcaagaacaaaaataaataaatggcacctacttaaactaaaatgcttctgcacagcaaaagaaataatcaacagagcaaaaaaacaacccacagaatgagagaaaatatttgtaaacaatgcacccaacaaagaattgatatccagaatctcccaacaaagaattgatatccagaatctacaaggaactcaaattagcaagaacaaaaacaaataatcctactaaaaagtgggcaaatgacatgattagacatttctcaaaagaagatatacaactgggcaacaaacatatgaagaaacactcaatatcactaatcctcagggaaatgctggtaaaaccacaatgagataccaccttaccctgaccagaacggccattattaaaaagtcaaaaaacaatagatgtcaatgaggatgtggtgaaatggggatgcttaaacactggtgagaatgcaaattagtacaatctctaagcagattcctcaaagaactaaaagtacatccactatgtgatctagcaataccactgctaggtatctaccaaaaggaaaagaagtcattatgtcaaaaagacactggcactcgtatgtttatcacagcacaatccacaattgcaaagatttggaaccaacttaagtgtccatcaatccatgagtggataaggaacatgtggtatgtgtataccatgaaataccactcagccatagaaaagaatacaataatgtctttttcagcaacttgaatggagctggaggccattattctaaataaagtaactcaggaatggaaaaccaaacactacatgatctcacttacaagtgggagataagctatgggtatgcaaaggcatacacagtgatataatggacatatgagactcagaggtcggggaggttaccaaggcagtgagggataaaaaaaataaaactacaaaatgggtacaatgtacagtactcaagtgatgggtgcactaaaatctcagacttcaccgctatacaattcatccttgtaactaaaatcacctgtacccttaaagctactgaaattgtaaaacttttaaaaaataaataagtaaaaaataaaaatgaactggataaaactgtaaagttaaataacagtagatagacaggtccagtatataataagctaatgaaggaaggcacccccctggataggactcataaccttaatgtgaaggagagccatcttactgatgaggttgaaaacaattcttatttgatttgatacaacagagggctcttcactaactaataggggaaaaccaattgcattcagatgcacatggccaggtcgaatgtaataaaataaaatgtgtactctggaaaacagtctgcccttgatctcctggaaattgattatctcagggatgccaagatgacaggaaatgttaactgactcccagtgtgacaaggtctacgggacttagaacagggataaaggcatttacagataaagtaaaaagaaacttggaaatcaaaatataaaaagttgtgaatatggatattggcaccaacaataatagtggagaaaaggatggagaataaaaggtaaatggggctgggcgtggtggctcacgtctgtaatcccagcagtttgggaggccaaggcgagtgggtcacctgaggtcaggaatttgagaccagcctggccaacatgatgaaacctcgtctctactaaaaatacaaaaataagttgggtgtggtggcagccacctgtaatcccagctacttgggaggctgaggcaggagaatcacttaaacccaggaggtggaggttgcagtgagccaagatcgtgccactgcactccagcctgggcgacagagcaagactctgtctcaaaaaaaaaaaaaaaaaagtaaagggacacttgaattaatgaggaatgtagaagcatgtcctatatatagatcaggaagaagcagaaataagatgatgaaagattaggataatggatgcattcacttctaaggagatgttgttgaaagatggagaagcaatgcttaatgagtcacaatgaggctggcaattgtccctcttatccctgtgtgacagggctcccttttcagccagtgttttctggcaccacatttgatgtttatggctggtattcaggccgtttggtgtccatagcagttggtagagattcagaatattctcattggctgctaggtgaggaaaatgaggaaattaacctctattgaaaagagtttcaagcgaagtaggcaattaaggggaaacccaacatttagagagaaaagtgatggaaaagtttcgagaaatatttgagacataggagaatgtgttcacaatagaaggcagtataaggagcagattgtgcatgaaaggaatgagaggaaagaacagagaagtagggctgaacagtgtgctccacagtgatcactttcagtaggcaatgaaggagccaggagcctgggaggtggattgcctctacagatttgttatgagaacactcctcccactccttggggagggattttctcactaagcacactctggtctcttctccacccctgaaacagtccctgcaaaggtagagtgacgaatctgatctgtaaattcagggagaataattgggcatgcttagctcagcccatacggtccacttgacgacaggccatgaagatactgagttcttttctactcttccatgtatggtttctcacttgggaagccaccttgcccagtgactgctggtgattctgcctcattctggggtttggttgacagctccactcaccttcactctaagttaccacctccaacctggcctctatcagtaattaacatggcatttgagttctctattggccacatgatgaatgccccttgagcacactttgtttcatacttgttcagaatccagccagcaaagggggaagctgttttgggagaccttctcagaaatccccaacattaccgaccgagagaaaaacatagggtagagagaattcctgtgtattttaaattagtgccaaacaaagaggtaatcaatgagaataataatagctaacaattactgaacacataccacgtgccaccatttttggcaaatgcagaggctaaattaaataacaaactattttatcttttataaatatccaagtaataacaaacatgctattttaattttatcttattcattttttaaatataaaaataaagaagagatcatttacgcctttagctaaacttacctaatctagttaaaaatggcttttatccaaaagtcaggcaataacaaatgctgtctagcatgtggagaaaaaggaacccttgtgaactgttggtgggaatgtaagttaatataaacactatggagaacagtttggaggttccacaaaaaactaaaaatagggctaccatatgatccagcaatcccactgctggctatatacccaaaagaaaggaaatcagtatatcgcagaaatatctgcactcccatgtttgtggcagtactgttcacaatagccaagatttggaagcaacctaagtgttcatcaacagataaatggataaagaaaatgtatttatacaaaatggagtactattccaccattctgtcatttgcaacaatgtggatggaaggggagatcattatgttaagtgaaataaaccaggtgcagaaagacaaacattgactattctcagttattttggggatctaaaaatcaaaacaattgaactcatggagatagagtagaaggatggttaccagaggctgggaagggtagttggtggggcaggggggtgatggggaggaagtggtgatgattaataggtataaaacagttagaaagaatgaataagatccagtatttgatagcaaaacaagggtgattatagtcaataataacttagttgtacattttaaaataactaaaaaagtataattggattgtttgtaacacaaaagataaatgcttgaggggatagataccacattttccacgatg

SEQ ID NO: 475 - DNA, 4048 bp, Homo sapiens
gaacaagcgcactgaactgctttttacagaacattctactcaagaactgaagaatatacaatcctctcatcagcatatggaacattctccaaaatacataaggccacaaaacaagtctcaattaatttttaaaaatcaaaattatatcaagcatcttcatagaccaatgaagcagaatagagaacctagaaatacagccaaatacttacaaccaactgattttgacaaagcacacaaaaacataaattggaaaaaggacatgctattcaataaatgatgctgggaacactggaaagtcacatgtggaagaatgaaactgaattcctatttctcactatatacaaaaatcaactcaacatggattaaagacttaaatctaagacctgaaaccattaacaattttagaagaaattctaggaaaaactcttctgaaaattggcctaggcaaagaatttatgactaagaccccaaaagcaaatgcaaatgtagcaagaacaaaaataaataaatggcacctacttaaactaaaatgcttctgcacagcaaaagaaataatcaacagagcaaaaaaacaacccacagaatgagagaaaatatttgtaaacaatgcacccaacaaagaattgatatccagaatctcccaacaaagaattgatatccagaatctacaaggaactcaaattagcaagaacaaaaacaaataatcctactaaaaagtgggcaaatgacatgattagacatttctcaaaagaagatatacaactgggcaacaaacatatgaagaaacactcaatatcactaatcctcagggaaatgctggtaaaaccacaatgagataccaccttaccctgaccagaacggccattattaaaaagtcaaaaaacaatagatgtcaatgaggatgtggtgaaatggggatgcttaaacactggtgagaatgcaaattagtacaatctctaagcagattcctcaaagaactaaaagtacatccactatgtgatctagcaataccactgctaggtatctaccaaaaggaaaagaagtcattatgtcaaaaagacactggcactcgtatgtttatcacagcacaatccacaattgcaaagatttggaaccaacttaagtgtccatcaatccatgagtggataaggaacatgtggtatgtgtataccatgaaataccactcagccatagaaaagaatacaataatgtctttttcagcaacttgaatggagctggaggccattattctaaataaagtaactcaggaatggaaaaccaaacactacatgatctcacttacaagtgggagataagctatgggtatgcaaaggcatacacagtgatataatggacatatgagactcagaggtcggggaggttaccaaggcagtgagggataaaaaaaataaaactacaaaatgggtacaatgtacagtactcaagtgatgggtgcactaaaatctcagacttcaccgctatacaattcatccttgtaactaaaatcacctgtacccttaaagctactgaaattgtaaaacttttaaaaaataaataagtaaaaaataaaaatgaactggataaaactgtaaagttaaataacagtagatagacaggtccagtatataataagctaatgaaggaaggcacccccctggataggactcataaccttaatgtgaaggagagccatcttactgatgaggttgaaaacaattcttatttgatttgatacaacagagggctcttcactaactaataggggaaaaccaattgcattcagatgcacatggccaggtcgaatgtaataaaataaaatgtgtactctggaaaacagtctgcccttgatctcctggaaattgattatctcagggatgccaagatgacaggaaatgttaactgactcccagtgtgacaaggtctacgggacttagaacagggataaaggcatttacagataaagtaaaaagaaacttggaaatcaaaatataaaaagttgtgaatatggatattggcaccaacaataatagtggagaaaaggatggagaataaaaggtaaatggggctgggcgtggtggctcacgtctgtaatcccagcagtttgggaggccaaggcgagtgggtcacctgaggtcaggaatttgagaccagcctggccaacatgatgaaacctcgtctctactaaaaatacaaaaataagttgggtgtggtggcagccacctgtaatcccagctacttgggaggctgaggcaggagaatcacttaaacccaggaggtggaggttgcagtgagccaagatcgtgccactgcactccagcctgggcgacagagcaagactctgtctcaaaaaaaaaaaaaaaaaagtaaagggacacttgaattaatgaggaatgtagaagcatgtcctatatatagatcaggaagaagcagaaataagatgatgaaagattaggataatggatgcattcacttctaaggagatgttgttgaaagatggagaagcaatgcttaatgagtcacaatgaggctggcaattgtccctcttatccctgtgtgacagggctcccttttcagccagtgttttctggcaccacatttgatgtttatggctggtattcaggccgtttggtgtccatagcagttggtagagattcagaatattctcattggctgctaggtgaggaaaatgaggaaattaacctctattgaaaagagtttcaagcgaagtaggcaattaaggggaaacccaacatttagagagaaaagtgatggaaaagtttcgagaaatatttgagacataggagaatgtgttcacaatagaaggcagtataaggagcagattgtgcatgaaaggaatgagaggaaagaacagagaagtagggctgaacagtgtgctccacagtgatcactttcagtaggcaatgaaggagccaggagcctgggaggtggattgcctctacagatttgttatgagaacactcctcccactccttggggagggattttctcactaagcacactctggtctcttctccacccctgaaacagtccctgcaaaggtagagtgacgaatctgatctgtaaattcagggagaataattgggcatgcttagctcagcccatacggtccacttgacgacaggccatgaagatactgagttcttttctactcttccatgtatggtttctcacttgggaagccaccttgcccagtgactgctggtgattctgcctcattctggggtttggttgacagctccactcaccttcactctaagttaccacctccaacctggcctctatcagtaattaacatggcatttgagttctctattggccacatgatgaatgccccttgagcacactttgtttcatacttgttcagaatccagccagcaaagggggaagctgttttgggagaccttctcagaaatccccaacattaccgaccgagagaaaaacatagggtagagagaattcctgtgtattttaaattagtgccaaacaaagaggtaatcaatgagaataataatagctaacaattactgaacacataccacgtgccaccatttttggcaaatgcagaggctaaattaaataacaaactattttatcttttataaatatccaagtaataacaaacatgctattttaattttatcttattcattttttaaatataaaaataaagaagagatcatttacgcctttagctaaacttacctaatctagttaaaaatggcttttatccaaaagtcaggcaataacaaatgctgtctagcatgtggagaaaaaggaacccttgtgaactgttggtgggaatgtaagttaatataaacactatggagaacagtttggaggttccacaaaaaactaaaaatagggctaccatatgatccagcaatcccactgctggctatatacccaaaagaaaggaaatcagtatatcgcagaaatatctgcactcccatgtttgtggcagtactgttcacaatagccaagatttggaagcaacctaagtgttcatcaacagataaatggataaaga

SEQ ID NO: 476 - DNA, 4045 bp, Homo sapiens
agccaggacagactgagaggctgatacatactttatgtgctaaggccagaagaggaaaatcatttcatacctcaagatgtggatttcggtaaacactattagcatatggccataagcagcttgtattccttacagagcacatctattagaagagctttgtgttattctgtttcatccctaatactgtaacccacaaaaagggactactgtatgaataattaatagaagtaaaagttagaaaaagttaggagagaataggattttcttaaatcggtcattttaaatcttctattattattattatcttgcatatcatacatcaacagtgttttcctttttcttatcttggagctatttctctatcatattcctgcttcgagtagaaagaaaaaaaatacacccaaatggtaattttgataatctagtcacaagggttcaaaaagcaaataaataaatttcagggtcttatcattttgtattaaagcaacttattacataaatgacattttcctttaggagatgtgtgcattcgtgtttgtcatttttaaaatggaaatagaatcatagtgtcaccttaaaatgaccagatttagaatgagaactttcattacatgggaggagtgaaaaatacaataaaataagatgatatgtatatacaagaaaatgggcataaagagatattaaagaaatcaatggaaagtgaacaaggcacaaatttaatcacacaaggatctaaggattaatgtgtcagttgataacatttcagcatatcttttggctgatcagagtaaaagtatacatttgcataggaacagaaatttgagcagtataaaaatgtaatcaaagaaaaggcttggctcagaaaagtaaaacacataaaatgattttaaatagtatggtcttcatctgcattacttttttttttttttactacaagtccttatttttcacttttattaaacacaaacaagatagtttgtaattccttatgactcgatgccttttgaatttaagattaatttgtagtttaaaaattttctcaggtcgggtaaggtggctcatgcctgtaatcccagcactttgggaggccgaggaagacagatcacctgaggtcaggagttcgagaccagcctgaccaacatggtgaaatcccgtctctagtaaaaatacaaaaattagccgggcatggtggcatgcgcctgtagtcccagctacttgggaggctgaggcaggagaatctcttggacccaggaggtgaaggttgcagtgagctgagatcatgccactgcactccagcctgggcaacagagcgagactccatctaaaaaaaaaaatacaaaatacaaaattagctgggggtggttgcaggtgcctgtagtcccagctacttgggaggctgaggcaggagaatcacttgaacctgggaggcagaggttgcagtgagctgtgatcatgccactgcactccaacctgggtgacagagcaagactccatcttaaaaaaaaaaaacaaagttagttgggtgtgatggcaggcacctgtagtcccagctacttgggagactgaggcaggagaatcgcttgaacccaggaagcagaggctgcagtgagccgagatcatgccattgtactccagcctgggcaacaagagtgaaacttggtaaaacaaacaaacaaacaaacaaaaaacaaaaaaaacccaaaacctcaatatattatgattctaaaacctattagaaatttagataaacttcataataagctaaaagcaatattatacttcagatactggtagtgtttgaaaaaaatttagttaaatgtgaagataatacaaatggaaacaatgtatgcactttaaatgtctactggcaactaaaagcagacggtggtgggggggggaatcctgtgataattggttcaactctgatacttatctataattgtatttcaaatatctacctcactagaatttgaattaagcgactcactataggttatccacttaccttacaatggtcatactggagctgtaaggctggaacatctcctccaataggcatttgtttcttaagctcttcatctttcatattcagccatttgatcagttcttctaaggacatcagcaacctgttccacttctcagcgctggcctccaaatgggccctgttgagagataataataataataataaccacatttagaaatgcaaattacattcacaaaattatctaccttcctttagcataataatcttatctgaccaagtaatgtttacttccacaaaagagactgactccttgtaaatacatatatatatgtatttataatatactatatatacatatatatgtatgatatacatatatacaatacatatattacataagtatatatatttatacatatgtatacacacatatatccatttcctgtaagaaacagctattttgaataggctataatattcagaggatttattggtaataactatcaaaatttaaaacacagacctatacaaaacgaaggctttcaagaaggatgtccgtgatagaatgtacaattataaaccaagttttgatagtttatgtatagtatatacgcacatccaaatatatttttttctcattttatctctatacatggagagagagagaggaaaataaccactaagagcacagtaaatacctaattttagctatttttacgccatttaaggatttacaacagactcatagtatttttctttccaaaaaaaaaaaaaaaaaaaaaaaaaaaccactgactaattattattattatttttttttttgagacagagtattgctctgtcacccaggctggagtgcagtggcgcaatctcggctcactgcgacctctgcctcctgggttcaaactattctgctgcctcagcctcctgaatacagctggaattacaggcatgtgccaccatgcccggttaattttcgtatttttagtagagacgggatttcaccatgttgttcagcctggtctgaaactcctgacctcatgatccaccggccagggactcccaaagtgctgggattacaggtgtgagccaccgcgcctggtcttgattaacttttttaggaatggaaattactgatgtgttactttctcttgtaaccaaaaactccttctgttgtaaccaaaaagcagaacaatagcaatgtttacttcaaaaagttggaaaataatcaggcattgcttcgacaggatactatttggcttaaggttgaccaatgtctagtgacaaatgaccagtgtgaatagagaacagttgggcgaaagtcactgcagtactttatactctcatttaaaggtgaggtctttgtttcaataataatttctgcatttaacacagaaatgcaccttcagattcttagattatgaactccataatcacagatatgtttaggaaatacattttgatatggttaaggttccaataagagcaaaggcccttgagaataggagtataaatctatgcacatgttccttttttgctcttgttagggccctggtgaaagcccacttatccagcctcaggcccactggtgggctggatttgaaaatatggatcagtcagaaacaactccagcgactcaaggaatcgaactgggcttgactcaatcctgcatcatcccagagggcagactgtgaatgcgggcttatgccttaacttggggaaatggaattactgtgactgcccatgatctttgaggtttagaggtgtaacaaggcacacgtctgcctttcatcagcatatgctgattaaaaaacgctgtgtgaaataataaaaaaagtttaaatacagaacgaagttcaaagcattttgtaaatctctgagaacagtatgattagaaaatttattttcttgtatttatgatcagttctatttattccacaggtgctacaattgaactcattttacaaaactgtggttaacaaggtcctgattctgcttgagctccagcttttctgtgttcatattgattaactttaggccaaatatgtaattaccttt

SEQ ID NO: 477 - DNA, 4068 bp, Homo sapiens
tcctaagaaaatgatccagaaaagctacgaacacaaaagtgttcattataacattatttatgatttttaaaaaattgaaagaaacttaaatctccaacacctggaatatatttaggttctatgatatggccacaatagaggccattatgcaaccttgaaaagttattgtgataatgaccacatagcaatgtgaagaaataggcatgacatgtatctaagtgaaaaagatgacataaaaactctgcacccaagtaaaactatgcaaaaggtaaatatgcaaaaaggaaataatgcaaaatgaaaagggttgttatggtgataaaattatggccatgtttttattctttatttcataaactctgtaatatgttattattttcataattaaaaattatacttttaagaaaggaatgcccactagaattgagctcatttagcattgaataaattactgctttcaaagaacagcattatgaagaattacaaatgtgtttagaagcccattttttgtatttgtaacaattataaaactttccctttatattttgcttcaatgacttggggctatatttatttataaaatataatgcatgacaacatagtcactgaatgagagactccacatgtttaagcttctccctgcatttgttaagaatctcaactcaactagcattcaaaggtatcaaattcctacaacagagagaagcacaaacactggaagaatctagcaatatccagcacatacagctaaaaaaaaaaaaaagctatattttaaaagctatctcaacaattaaaggtatgccaattcattttcccttaaataaaaatctttcccattcttgagttgaaaatttaggcagtattaagatagagaaaagataacctctgaactgactacaatatcaaggcataaagtgccattgtgttatttaatttgcttacatttcaaatatgtcatgtaactgaaatgatttctagctctcgagacaagattattgcttacacttctatttcagttattacctttattaaacatttggctatttaaagtaggaatattttcaaaatgtaatattctttagaacgcaaatgaataaaaaagaattactgagaaataaagagacaaaaggaacattcacaccaaaggacatgttcccttgggtatagctctttcagtcaacattcaacttttatcgagcatccagagtaccaagcaaaaaaaaaaaaaagacatagaaaataagtcattgtgttagattctgataaatgctatagaaaaagaaagaagtagaaaagggtggggggggaagagagagagaatgagagagagagaaggagtgctcagagggagctgcagttcaagtagagaagttgagtaaagaaggggcattttgggcagagcagacaggctggcactgtgactgaaagctcagcaagggaccagtgtggccgaaaccagtgtgtcagagaaaaaacagcaagagaggaaatgagcaaggtgtgagtagggggtaggtcagatcaggcagggccttgcagaccattccgagagctgtggcttttcctctgaataagttaggaagcccctacagagtttgatttattttaataggaacactctggttgctggactgatacttccagagacagaggagtgtcacaggtggtagattcagattctatattttgaacagagaaccaacaggatttcctaacagactgaaaatgagagaaaggcaggactaaaggtgattattatttgttacctaagcaactgaaataatattcctaccaactgaaatgcagaacgctgggtagaacatgttataggggccaattcaggaagccagtttggtcatattaactgtgaggtgtttattacacactcaagtagagatgacatgtaaacggatatatctttgggagtgcttggcatatagatggcatttttaaacccaagaaggagtgaatacagagaaggtgacatggcctgacaagtgacacatcccaattttagaagacaggggagagaaggaagaaccaggaagggaaactgagaaagagctaccagtgacgtaagaaaaacatcaggagagtgcggtgttctagaagtcaagtagagtccgaggaacagttaataagtcagcaggaaaggtgaggtcttggaatgaacccctagtcaaagctcagccaacactaacaaacagagacatcacaaattacaacaaggggcatgtaactcagagtggggctcaggatggcttccttacctaaggagatggaaagatgcttgaagcaagttttaagaggcattcaatattgtgttacatgtgtcagaatatatatgttaatgttcttcgcaatgcaagcaggtctggctatgtgattgcagacctcagtgtaacagggccccttgtccaaatattactaagaatctcaagatggcagcagaagaacattaagccaagtgcagaaaccttgtaagagcagagccctgtgtgactgcatgggacacctgagaagctggccctaaatgcagggtagctgaattataacaaatagaggtattgctggtacagcaggcttctttagcttttggtttcaaaaaagcagttaactgcttactggagaatataagcagaaaaaaataaatgatgcaaacatgagacaaatctgctagaatgtaatttactcttttcccaacttgctttcaaagctaaatcagcatatatggatctgaagtcattacagaatgacagcaaaaaagggcagagcactcattaaatttgatagcactaataaaactacatgaaaaaggagacagaaaacaggcttactttccgttggtatgcagacaaaatttaaaaaaaaatctcctacatagtgccttgaaagttttggttaacatccctcaatgagcagttaatatacaaaattcattttggttccaccccagtgacataaaaaataatgcctgaatcagaataccaaatatcaatgttaaaaatgagacagaaattcttttgcttttcatagtaataaaatagtatccttccctgtacttttttttttttttttttgagacagagtttcactcttgtttcccaggctggagtgcaatggcgcgatctcggctcaccgcaacctcctcctcccgggttcaagcgattctcctgcctcagcctcccgagtagctgggattacaggcatgtgccgctatgcctgacaaattttgtatttttagtagagacggggtttctccatgttggtcaggctggtctagaattcctgacctcaggtgatccacccacctcagcctcccaaagtgctgggattacaggcatgagccactgcaccctgctttttatttatttatttttttttttgagacagagtttcgctcttgttgcccaggctggagtacaatgctgtgatcttggctcactgcaacctccacctcccaggttcaagcgattctcctgcctcagcctcccaagtagctgggattacaggtatacaccaccacacccagctgatttttttgattttttttttttagtagagatggggtttcaccatgttggtcaggctggtcttgaactcctgacctcaggtgatccactcacatcagcctcccaaagtgctaagattacaggcatgagccactgcacccggccccctgtactctttaaaatacatgcacacataaatgtattccttcatccagctaatatatgcaatacaggttgagtatctctaatccaaaatctaaaatacaccaaaatccaaacatttctgagtgtcaatattgttactcaaaggaaatgctcttaggagcattttgaatttcagattttctgattagggatggtcacctggtaagtgtaatgcaaatattcgaaaatatgaaaaaatctgaaatctaaatacttttggtcccaaatatttcactaagggatcctcaattagtacctattctaatgtggcactggattaggtgctgaacttgtattttcttctttcagtcttattctaagtatcatcacaaaaggaggtaagcagcacccc

SEQ ID NO: 478 - DNA, 4054 bp, Homo sapiens
cagcctgggcaactgggcgagactctgtctcaaaaaaaaaaaaaaaaaaagaaaaaagaaaagaaaaagaaaaagaaaaaaatggaattatgtgattctccaagataaagccaaaatatttcataagcagaaaactgtgttgcaagactcatatcagtttagattcttagaaagcaaagaaataaatgcagcggtttttttgtgaaccggtttcttccagaataaaagggcaaaacaattctctaaggaggtataaatggtcagctagatgacatcacacacactaatttcagacaaatataaatttcttcaactaatgtgtttaacaagccatggagagcttttctcctatccttctaggcatgactaacccaaacatcaaaccagttctcctcttcctctttgtggagagaaccttgactcaggtgtctgatattccaaaactgttttctaaatttctatacatctatgaagtactagtattttactgctaacaatacaaggatcactaataatagaacaaaaatgagaaatcacaggccagggtatggtaaagcttcactttcacacattgctggaggcaaaaaattggtttgatcatttgggaaagtaggctggcaatatatcaaaagtcattactatggtcatattgtgtgaaacaggaatttcacttttgggaatatatcctaagaaaatgatccagaaaagctacgaacacaaaagtgttcattataacattatttatgatttttaaaaaattgaaagaaacttaaatctccaacacctggaatatatttaggttctatgatatggccacaatagaggccattatgcaaccttgaaaagttattgtgataatgaccacatagcaatgtgaagaaataggcatgacatgtatctaagtgaaaaagatgacataaaaactctgcacccaagtaaaactatgcaaaaggtaaatatgcaaaaaggaaataatgcaaaatgaaaagggttgttatggtgataaaattatggccatgtttttattctttatttcataaactctgtaatatgttattattttcataattaaaaattatacttttaagaaaggaatgcccactagaattgagctcatttagcattgaataaattactgctttcaaagaacagcattatgaagaattacaaatgtgtttagaagcccattttttgtatttgtaacaattataaaactttccctttatattttgcttcaatgacttggggctatatttatttataaaatataatgcatgacaacatagtcactgaatgagagactccacatgtttaagcttctccctgcatttgttaagaatctcaactcaactagcattcaaaggtatcaaattcctacaacagagagaagcacaaacactggaagaatctagcaatatccagcacatacagctaaaaaaaaaaaaaagctatattttaaaagctatctcaacaattaaaggtatgccaattcattttcccttaaataaaaatctttcccattcttgagttgaaaatttaggcagtattaagatagagaaaagataacctctgaactgactacaatatcaaggcataaagtgccattgtgttatttaatttgcttacatttcaaatatgtcatgtaactgaaatgatttctagctctcgagacaagattattgcttacacttctatttcagttattacctttattaaacatttggctatttaaagtaggaatattttcaaaatgtaatattctttagaacgcaaatgaataaaaaagaattactgagaaataaagagacaaaaggaacattcacaccaaaggacatgttcccttgggtatagctctttcagtcaacattcaacttttatcgagcatccagagtaccaagcaaaaaaaaaaaaaagacatagaaaataagtcattgtgttagattctgataaatgctatagaaaaagaaagaagtagaaaagggtggggggggaagagagagagaatgagagagagagaaggagtgctcagagggagctgcagttcaagtagagaagttgagtaaagaaggggcattttgggcagagcagacaggctggcactgtgactgaaagctcagcaagggaccagtgtggccgaaaccagtgtgtcagagaaaaaacagcaagagaggaaatgagcaaggtgtgagtagggggtaggtcagatcaggcagggccttgcagaccattccgagagctgtggcttttcctctgaataagttaggaagcccctacagagtttgatttattttaataggaacactctggttgctggactgatacttccagagacagaggagtgtcacaggtggtagattcagattctatattttgaacagagaaccaacaggatttcctaacagactgaaaatgagagaaaggcaggactaaaggtgattattatttgttacctaagcaactgaaataatattcctaccaactgaaatgcagaacgctgggtagaacatgttataggggccaattcaggaagccagtttggtcatattaactgtgaggtgtttattacacactcaagtagagatgacatgtaaacggatatatctttgggagtgcttggcatatagatggcatttttaaacccaagaaggagtgaatacagagaaggtgacatggcctgacaagtgacacatcccaattttagaagacaggggagagaaggaagaaccaggaagggaaactgagaaagagctaccagtgacgtaagaaaaacatcaggagagtgcggtgttctagaagtcaagtagagtccgaggaacagttaataagtcagcaggaaaggtgaggtcttggaatgaacccctagtcaaagctcagccaacactaacaaacagagacatcacaaattacaacaaggggcatgtaactcagagtggggctcaggatggcttccttacctaaggagatggaaagatgcttgaagcaagttttaagaggcattcaatattgtgttacatgtgtcagaatatatatgttaatgttcttcgcaatgcaagcaggtctggctatgtgattgcagacctcagtgtaacagggccccttgtccaaatattactaagaatctcaagatggcagcagaagaacattaagccaagtgcagaaaccttgtaagagcagagccctgtgtgactgcatgggacacctgagaagctggccctaaatgcagggtagctgaattataacaaatagaggtattgctggtacagcaggcttctttagcttttggtttcaaaaaagcagttaactgcttactggagaatataagcagaaaaaaataaatgatgcaaacatgagacaaatctgctagaatgtaatttactcttttcccaacttgctttcaaagctaaatcagcatatatggatctgaagtcattacagaatgacagcaaaaaagggcagagcactcattaaatttgatagcactaataaaactacatgaaaaaggagacagaaaacaggcttactttccgttggtatgcagacaaaatttaaaaaaaaatctcctacatagtgccttgaaagttttggttaacatccctcaatgagcagttaatatacaaaattcattttggttccaccccagtgacataaaaaataatgcctgaatcagaataccaaatatcaatgttaaaaatgagacagaaattcttttgcttttcatagtaataaaatagtatccttccctgtacttttttttttttttttttgagacagagtttcactcttgtttcccaggctggagtgcaatggcgcgatctcggctcaccgcaacctcctcctcccgggttcaagcgattctcctgcctcagcctcccgagtagctgggattacaggcatgtgccgctatgcctgacaaattttgtatttttagtagagacggggtttctccatgttggtcaggctggtctagaattcctgacctcaggtgatccacccacctcagcctcccaaagtgctgggattacaggcatgagccactgcaccctgctttttattt

SEQ ID NO: 479 - DNA, 4054 bp, Homo sapiens
tgagtagctgggattacaggcaggtgtcaccacgcccagataattttttatatttttagtagagatggggtttctccatggtcaggctggtctcgaattcctgacctcaggtgatccgccttcctcggcctcccaaagtgctatgatcacaggcatgagccactgagcctggccttgcttcaaattttcaatagctctgctctttctcattagattctagcactcagtatatcttttggattaatgaatgagaaaatgaataaactggcataaaagaaaatgtggaacctcaggaggccattgttagaaggggatcaaggaaggaaaacacctgagaaatgggagcatttcatacaaagtaggtctgtggaagaaagcagcatggagcaactctgcagtagaaggaagtagtcttccccttccagcccccatagaagacattattatctcaagacaacatctgtgttgttttgctttcttaacaatctcattgaccctcactggtgaaagtcaaagaaatccacagggctcaccccttttgacccttcagggatccggctccagtgccacctgcaccaccagcatgagctgcagccttccctcacggggatccagcattcaccacactccctcaccatggcctctttgcaaacctgactctggtgccagactgagccctcatggaaggctgaaatttgtgccagagcaggtatagcggaaagccaataaatttttgtatgaatgaaggaggagatgttaaaaatactgttctgtggtaaagtaaaaccagacaaagatttgcagccaaagccttaggtacagtccagtccataccacacaggcacacccttactcatcctgtgctcatgggcccttacttgggtttgtcccttaaattctctgcgtgttaatcatctctctcattttactaacttcactggtgagacagtgaatgaaaagatattttgaaactattcagtgctgtagaataaaaaattactttttttaagagacagggtctcactctgttgcccaagctggtacaccatcaaagctcactgcagccttgaacttccgggctcaagtgatctttctgcctcagcctcttaagtagctaaactacagttgcatgccaccataccaggctaattaatttttttttaaatagggacagagtcttgctatgttgaccaggccagtcttgaactcctggcctcaagtgatcctcctgacttttcctcccaaagtactgggattacaggtgtgagcaccactcccagcccattactattaaaatcatgctaatctaaaattctaccatgtttctcagctcttgtctcagactgaatttctttccaaagcctctattcactcttacttgtagaggaaggttctagccattttacctagagctttggttgaccaatgccagaacaaagccctccgtttgcaggaacatctgaaagtagatgacttaactcttctaagggataaattatttaattatgaaaaaaatgggccaggtgcagtggctcaggctgggcacagtggctcatgcctgtagtaccagcactttgggaggctgaggcgggtggatcatgaggtcaggagttcgagaccagcctgatcaacatggtgaaatccccgtctctactaaaaatacaaaaattagctgggtgtggtggcaggcacctgtaatcccagctacttgggaggctgaggcaggagagtcatttggacccgggaggcggaggttgcagtgagccgagatcgagccattgcagtccagcctgggcaactgggcgagactctgtctcaaaaaaaaaaaaaaaaaaagaaaaaagaaaagaaaaagaaaaagaaaaaaatggaattatgtgattctccaagataaagccaaaatatttcataagcagaaaactgtgttgcaagactcatatcagtttagattcttagaaagcaaagaaataaatgcagcggtttttttgtgaaccggtttcttccagaataaaagggcaaaacaattctctaaggaggtataaatggtcagctagatgacatcacacacactaatttcagacaaatataaatttcttcaactaatgtgtttaacaagccatggagagcttttctcctatccttctaggcatgactaacccaaacatcaaaccagttctcctcttcctctttgtggagagaaccttgactcaggtgtctgatattccaaaactgttttctaaatttctatacatctatgaagtactagtattttactgctaacaatacaaggatcactaataatagaacaaaaatgagaaatcacaggccagggtatggtaaagcttcactttcacacattgctggaggcaaaaaattggtttgatcatttgggaaagtaggctggcaatatatcaaaagtcattactatggtcatattgtgtgaaacaggaatttcacttttgggaatatatcctaagaaaatgatccagaaaagctacgaacacaaaagtgttcattataacattatttatgatttttaaaaaattgaaagaaacttaaatctccaacacctggaatatatttaggttctatgatatggccacaatagaggccattatgcaaccttgaaaagttattgtgataatgaccacatagcaatgtgaagaaataggcatgacatgtatctaagtgaaaaagatgacataaaaactctgcacccaagtaaaactatgcaaaaggtaaatatgcaaaaaggaaataatgcaaaatgaaaagggttgttatggtgataaaattatggccatgtttttattctttatttcataaactctgtaatatgttattattttcataattaaaaattatacttttaagaaaggaatgcccactagaattgagctcatttagcattgaataaattactgctttcaaagaacagcattatgaagaattacaaatgtgtttagaagcccattttttgtatttgtaacaattataaaactttccctttatattttgcttcaatgacttggggctatatttatttataaaatataatgcatgacaacatagtcactgaatgagagactccacatgtttaagcttctccctgcatttgttaagaatctcaactcaactagcattcaaaggtatcaaattcctacaacagagagaagcacaaacactggaagaatctagcaatatccagcacatacagctaaaaaaaaaaaaaagctatattttaaaagctatctcaacaattaaaggtatgccaattcattttcccttaaataaaaatctttcccattcttgagttgaaaatttaggcagtattaagatagagaaaagataacctctgaactgactacaatatcaaggcataaagtgccattgtgttatttaatttgcttacatttcaaatatgtcatgtaactgaaatgatttctagctctcgagacaagattattgcttacacttctatttcagttattacctttattaaacatttggctatttaaagtaggaatattttcaaaatgtaatattctttagaacgcaaatgaataaaaaagaattactgagaaataaagagacaaaaggaacattcacaccaaaggacatgttcccttgggtatagctctttcagtcaacattcaacttttatcgagcatccagagtaccaagcaaaaaaaaaaaaaagacatagaaaataagtcattgtgttagattctgataaatgctatagaaaaagaaagaagtagaaaagggtggggggggaagagagagagaatgagagagagagaaggagtgctcagagggagctgcagttcaagtagagaagttgagtaaagaaggggcattttgggcagagcagacaggctggcactgtgactgaaagctcagcaagggaccagtgtggccgaaaccagtgtgtcagagaaaaaacagcaagagaggaaatgagcaaggtgtgagtagggggtaggtcagatcaggcagggccttgcagaccattccgagagctgtggcttttcctctgaataagttaggaagc

SEQ ID NO: 480 - DNA, 4040 bp, Homo sapiens
ctatacccactatactcaactatacatgcacaaatagactaaattaagtaatagctgggtttttctatgattattaataaaatatttaaattaagcaaaattgactgctccaggctgaaacagaaatgatattcaggcagcttaaataaaatagtagttgtagtaacagtaattctttaactggaataatttttaaagatgattcctgaggaaactggtggataaataatgcaatctcttttttaatctaaaaatatcacaagaagaggacaggtgttttctccatacatatgtatacaatgaattgtgtaattttctaaacacatttagaggtgagatagcctataaaattgttagcagttttatttagtgattgataccttagctttaaatcataaagtatgtttggtggggggtgcttgtgcatgtgcgtgcctgcctgcctgcatctgtatgtggtatggagagaggaagaccgacagaaggctccaactcccctgtgcagatctgacttttaaactgaactgaaggtaatgaacaggagagaaggcacaaatattccctaattccctctggaggtttgggggtaggggtgggtgaaggctgttgtcttgcacagcttcactgtgcagcagtgtggttcacacaggaattctgatctggtactgagaacagccaggggaggctggcagcacaagggagagaccagaaaacatggatgcaagtttaagaggctctagacattgagatcaaggaggagctaggaagttaggggccagatggccgtcagtgaacacagatagaggagataaaatcgaagggatgagtcaaaagccagccaaaatccagaggttaaggaagtcattgtcatagacgcatagggctctgttcttgcatctacctttcgttagctggatgactttggtcagcaccataatatcttcttggcctttgtgtttttatttttaaaaaaaatcatactgtatgatcggctcaactcattgggatagacaggagaatgaatatgaaagttgcttggaaagtacaaagaacaatgcaaaggatgagagattgttgtactgtgatactttctaacacatacaaactagggattaaaataaaaaaaaaaaacagttcaattgcattaaaaggaaaaagtatacattgacatgatacaaattaaatgaaattaagtatttccatattgctcaaacaaaagtcagggactactgacaaagttgtgaacttggtaaaatttctacaaggattcagataattttagttcagctaaaaatcatatttacttaatagccatttataagcagaaatctgagtagttgagttttccaaagagctacattttacccatttagccctatttttttatggttaccattttggaagaaaatttactaaaatataatataaattcctatgccttctcttaactgatttatattctgtcttcagaaatacacacaccataattcacagcttcagttttcttttactgttgaaagtcccaaagactacctcgttttgttttattttaggattcttgcatatctttttatcatttctttctcctcattgctgtcagacagctggagtcatttcttaccattaatctttgtccctgtcctgtcacttcattttgctacttacccatcactcaccggacatcaagttcatacagtcgcaccagtgtctacagcagaagttaatacctctgagaagtacttcagtggctttcccatgatctaagaaaaggatctgcactatgttttccatacaatctctatcctggctgctcagatcatttttttacactctttcagactctccatcaatgagggtaatcactaaaaaaagagggaagggccaagcttcagacacagacattggaaaacacagtgagagagaccacagggtgccagggaatcatggcagagagctcgggaagggaaagcgtccaggaagacacaaagccccagcagagccggcaggatgaccagcagctgcgtgggcaaatgaggcaagcgttggaaatcaggtcagaggacctacaggcagaaaactgggatgggcaatggggcaaaggcaaggaagaccactacctgcagaatgtagtgaggagcctggctcccagcaaacctcaagagtggagtgaagagaggcacaaggtggggccggatggaaaagctgaggacaaattgctgtgcagccttctgtgccaggtggaggagctcagatcccatggcatgcactacgggcagtttttatctccaggaaacctcatgccaggtttgtgctttaggtttatcattttaggatttatgttaatggagaaatgccaattaagaatatattgaaataggcctagcataagattggtatggaggaaactaatgtggaatggtcaattaatagtgatttttaaatacttaaaaatacatacaacagtataagataattagtaatggaaaaaatttaaaggaactggaagaaaaaaaggcattggagataaaaatcatggaggaaagtgttttctagaatggttacctaaaagaaaagaggtgactccatcttggtatgtccttatagcatggtacacatcacatactcacaaaatgcttattaaatagaaccgaaaaaaatcacttgatttcttcctgatctaacctctccaacattgagtacttcggcatcaaacaggataactaatgttcaaatgcttgctacttctaatagcagatgtacataagtcatggtaaacaacaaaagtataaaagctattatggatagttttcttcgatttatttttaacaagtaaaaccagccattgttatagaaaatagtatcaggaaaggaggcagtatgaaaattgctaatcataaacaaacaacaacaaaaaaaaccataaagttaaattgacatgacttctttttttcttgtccccccaaatgtagtattaaaaacatggagcttaaaacatcctgaatgtcacagtaaaataagaactcaaaaaccagtattttttttttctgtgtatctttctagacattttattagggatttgaaacatgtgtgcccaaatgacttcctcaccaacactatgaatgacgcatgactagaatgttcatgaaacttttttttaaattatacaatatcgttttaacccttaaatgactgaccactgagaagagtccagaataatgtggcgttttagtgatgtaacactttgtactgctttaaagtagctttttataaacttcgcaaagtcctagggaagaaaggagacaagaaaagctgactgaaggtagattttaaattggataagatgagacaagtgaacttcttatttttttccccaagcttaaaaaaacaaaactgtactagcaccttctttcttgttgtatgaagttacaatgttctgcctgactttccaggtcctctgtaggacctttccaggtcctctgaaccattcagcacatacaaccatctcatccccatctgccgtccaggcacaagactctggcaaccaggccaggctgtctactgactccccaaaatacagctgctctttccttatggctgagctgttctgctaaggattctgtccccagcatggccattcctctttcccgaacttaatcacttcctacctgtccatacccctaagactagctcaggaatcaacctctctccactctgaccctcagagtccttctctcctggaatgcccgcatcacttagaatcctcaggacacaactgagtgcatgactacggacacttttacattgcttgctttctcacgctctgtgctagttttgatctcccactaaattgaaacctcaggaacatgcgttatacttctttatccatcttggacagtgctcagctcatgcgtattctttcaaacactatgtaataagcacttactatgtgccagatagtattctaaatattacaaaatacagcagtgaaaaaaaaataaccctctgtcttcaaggagcttacatctacagggagtggaacg

SEQ ID NO: 481 - DNA, 4048 bp, Homo sapiens
taaacatattcaattactgtgtgaattattttaaaatcgaagaaaatgaaaataaaatgttgtttctattgaatagctacaaatactaattattacggaagtagtttaagatagtacactatggcagttaagagcatcaagttttgtgacataagccttagtttgtattttggctctgtcacatagaagacagtatgcctctaagcctctcagactctcagtttcctcatctgtagaatgggtggtaagtattcacccttcaaggaattattatgagaatgcaattaaacaaggtaggtaagtttcttggcacagtgtgtggcacatggtcagcacctgtgaaattctggcttgttgggaatgtctgcatttactaccatttttcactttccccttcctttatgggattggattcttcctccatttagcatgatattatgaagaaggtctgccaatcctagcagtccctgagtcccatgttactcgggccaagtcaaccagagccctctcctggaatattctggatctaaagaagggtgagcccttcctggtatgaggttgtgagctatacagtcataggaaagctaagaaaatgaaaacctgtacagagaagcagagaagaagacatggagaaaagccttctgggtggtattccagtccctgtggtcagctacgtctctaccgtggctcggttatggaggccaatgccttccccttcatgcctacacttagggaagctgtgtgcctgtcatttacaatgaatgaggctccaattaataaagttgttagtgaggaaaacaaaagccctgggagaaaacacccattagttttactagcccagttacttctattaactaatgtgtaatttgtcctcattttattacatacaagaaaataatgttgtaaccttaagttatatggagaatataaaagtaacttctactaaactatataataatttcaaatcttcactcatttaataactatgaaattgtatttgcataagtttgctaatactggcataaagtggactgacatagtggactgaatatgtcacttataaattcttcgttgtatcacaaaatatatgagattttacagggaagaaaaatagtcttaatacttggctttctaaaatatcaggaaatatttaaaaattaaacagtataccctgagttaaatattacataccatattatgtactaaatatacatagccatctgtcaaaggaccaaagaggaaaacattaacccatacatactttttcatctgaaaaattattattaactattcatcacatatacattcatacacaactatataaagttgtatatgcacatacacacatacacaactatacccactatactcaactatacatgcacaaatagactaaattaagtaatagctgggtttttctatgattattaataaaatatttaaattaagcaaaattgactgctccaggctgaaacagaaatgatattcaggcagcttaaataaaatagtagttgtagtaacagtaattctttaactggaataatttttaaagatgattcctgaggaaactggtggataaataatgcaatctcttttttaatctaaaaatatcacaagaagaggacaggtgttttctccatacatatgtatacaatgaattgtgtaattttctaaacacatttagaggtgagatagcctataaaattgttagcagttttatttagtgattgataccttagctttaaatcataaagtatgtttggtggggggtgcttgtgcatgtgcgtgcctgcctgcctgcatctgtatgtggtatggagagaggaagaccgacagaaggctccaactcccctgtgcagatctgacttttaaactgaactgaaggtaatgaacaggagagaaggcacaaatattccctaattccctctggaggtttgggggtaggggtgggtgaaggctgttgtcttgcacagcttcactgtgcagcagtgtggttcacacaggaattctgatctggtactgagaacagccaggggaggctggcagcacaagggagagaccagaaaacatggatgcaagtttaagaggctctagacattgagatcaaggaggagctaggaagttaggggccagatggccgtcagtgaacacagatagaggagataaaatcgaagggatgagtcaaaagccagccaaaatccagaggttaaggaagtcattgtcatagacgcatagggctctgttcttgcatctacctttcgttagctggatgactttggtcagcaccataatatcttcttggcctttgtgtttttatttttaaaaaaaatcatactgtatgatcggctcaactcattgggatagacaggagaatgaatatgaaagttgcttggaaagtacaaagaacaatgcaaaggatgagagattgttgtactgtgatactttctaacacatacaaactagggattaaaataaaaaaaaaaaacagttcaattgcattaaaaggaaaaagtatacattgacatgatacaaattaaatgaaattaagtatttccatattgctcaaacaaaagtcagggactactgacaaagttgtgaacttggtaaaatttctacaaggattcagataattttagttcagctaaaaatcatatttacttaatagccatttataagcagaaatctgagtagttgagttttccaaagagctacattttacccatttagccctatttttttatggttaccattttggaagaaaatttactaaaatataatataaattcctatgccttctcttaactgatttatattctgtcttcagaaatacacacaccataattcacagcttcagttttcttttactgttgaaagtcccaaagactacctcgttttgttttattttaggattcttgcatatctttttatcatttctttctcctcattgctgtcagacagctggagtcatttcttaccattaatctttgtccctgtcctgtcacttcattttgctacttacccatcactcaccggacatcaagttcatacagtcgcaccagtgtctacagcagaagttaatacctctgagaagtacttcagtggctttcccatgatctaagaaaaggatctgcactatgttttccatacaatctctatcctggctgctcagatcatttttttacactctttcagactctccatcaatgagggtaatcactaaaaaaagagggaagggccaagcttcagacacagacattggaaaacacagtgagagagaccacagggtgccagggaatcatggcagagagctcgggaagggaaagcgtccaggaagacacaaagccccagcagagccggcaggatgaccagcagctgcgtgggcaaatgaggcaagcgttggaaatcaggtcagaggacctacaggcagaaaactgggatgggcaatggggcaaaggcaaggaagaccactacctgcagaatgtagtgaggagcctggctcccagcaaacctcaagagtggagtgaagagaggcacaaggtggggccggatggaaaagctgaggacaaattgctgtgcagccttctgtgccaggtggaggagctcagatcccatggcatgcactacgggcagtttttatctccaggaaacctcatgccaggtttgtgctttaggtttatcattttaggatttatgttaatggagaaatgccaattaagaatatattgaaataggcctagcataagattggtatggaggaaactaatgtggaatggtcaattaatagtgatttttaaatacttaaaaatacatacaacagtataagataattagtaatggaaaaaatttaaaggaactggaagaaaaaaaggcattggagataaaaatcatggaggaaagtgttttctagaatggttacctaaaagaaaagaggtgactccatcttggtatgtccttatagcatggtacacatcacatactcacaaaatgcttattaaatagaaccgaaaaaaatcacttgatttcttcctgatctaacctctccaacatt

SEQ ID NO: 482 - DNA, 4071 bp, Homo sapiens
aggaagagcaaagagaccctggaacagacaaccagggcctcgctaagcaacctgagatctttccattttcttcattcaggaataatccctgaatttcctccaagtagtggcagttttgcgatttattcaagtgaattcctttgggctggacatcaacagatgggtcactgggggcaggcaggtggcaataaaaggaaagaggaaaagctgagaatgtttcaggaggaaaaaaacatctgttttgcctactactgtatcccgagtatctagaacaccccccttgtaaatggtaggcactcaaaacgtacttgttaaatgcataaatcaatctctgtacaatatctttaactagaaaaagaaaataaagaagaaaattctcccctttctctttcaagaatcaaaggacaggagttttagattcaaagtcttttatttcttgccacatgactgcccatctctccccaggctgcttcccagctaaacacagcccctagtgattgatcgagctacagagaagtctggagctttctacccatgctctgccattcttataagttaaatatggcttatgtttatgtactgccaaaataagtgatgagtttaattgaagaggagaattcatgcctttgctaggattatacttcttaaaaaatggcaaaacctctaattcttggaagattccagttttctactaagaacaacaacaatcacaaaacataagtacattataccacgctcaaagagtcttgtatcctccggtcctttatgtttaaatcagaaagtaatgtctcagatgctgattataataaaatacacacgtgtaaacgattgccatctttttatgaggcaaatgtgatttatgaatggctgtaacactgattagagaacataacagatggtaaacaattaattgaaaatgctatgtctatcaaacaaatctttatcatataattcttcatgaagactattgtttatttaaatgagattttattactacagtaggagttagcatgaaaaacattttccaaatttttacccaatcgatgggcttactcagctggctcgttgtattttagaaaagttgaagactagatgcattatattcatacagatattatagaactttaatttgtgaaaaatcacattactgctctgtagttaagaacaccggaaaagaaagtaacattatatttttctgcgctttttcatgcattacaactttactaatctaatttggacttgagaagctaatgaaattattgtcgtggtctataggcctgaaagcaattacttatacttcaaatttttatatgaaaattaaaaagacaaagtctaatattgcctagacaccttctccctcggtgttaggaaatcagtgaactgtttatgattccattatgcagcgtggtatttcagtgaagaaagagcaacaataaagaaaaaagcaaagagttataaacatattcaattactgtgtgaattattttaaaatcgaagaaaatgaaaataaaatgttgtttctattgaatagctacaaatactaattattacggaagtagtttaagatagtacactatggcagttaagagcatcaagttttgtgacataagccttagtttgtattttggctctgtcacatagaagacagtatgcctctaagcctctcagactctcagtttcctcatctgtagaatgggtggtaagtattcacccttcaaggaattattatgagaatgcaattaaacaaggtaggtaagtttcttggcacagtgtgtggcacatggtcagcacctgtgaaattctggcttgttgggaatgtctgcatttactaccatttttcactttccccttcctttatgggattggattcttcctccatttagcatgatattatgaagaaggtctgccaatcctagcagtccctgagtcccatgttactcgggccaagtcaaccagagccctctcctggaatattctggatctaaagaagggtgagcccttcctggtatgaggttgtgagctatacagtcataggaaagctaagaaaatgaaaacctgtacagagaagcagagaagaagacatggagaaaagccttctgggtggtattccagtccctgtggtcagctacgtctctaccgtggctcggttatggaggccaatgccttccccttcatgcctacacttagggaagctgtgtgcctgtcatttacaatgaatgaggctccaattaataaagttgttagtgaggaaaacaaaagccctgggagaaaacacccattagttttactagcccagttacttctattaactaatgtgtaatttgtcctcattttattacatacaagaaaataatgttgtaaccttaagttatatggagaatataaaagtaacttctactaaactatataataatttcaaatcttcactcatttaataactatgaaattgtatttgcataagtttgctaatactggcataaagtggactgacatagtggactgaatatgtcacttataaattcttcgttgtatcacaaaatatatgagattttacagggaagaaaaatagtcttaatacttggctttctaaaatatcaggaaatatttaaaaattaaacagtataccctgagttaaatattacataccatattatgtactaaatatacatagccatctgtcaaaggaccaaagaggaaaacattaacccatacatactttttcatctgaaaaattattattaactattcatcacatatacattcatacacaactatataaagttgtatatgcacatacacacatacacaactatacccactatactcaactatacatgcacaaatagactaaattaagtaatagctgggtttttctatgattattaataaaatatttaaattaagcaaaattgactgctccaggctgaaacagaaatgatattcaggcagcttaaataaaatagtagttgtagtaacagtaattctttaactggaataatttttaaagatgattcctgaggaaactggtggataaataatgcaatctcttttttaatctaaaaatatcacaagaagaggacaggtgttttctccatacatatgtatacaatgaattgtgtaattttctaaacacatttagaggtgagatagcctataaaattgttagcagttttatttagtgattgataccttagctttaaatcataaagtatgtttggtggggggtgcttgtgcatgtgcgtgcctgcctgcctgcatctgtatgtggtatggagagaggaagaccgacagaaggctccaactcccctgtgcagatctgacttttaaactgaactgaaggtaatgaacaggagagaaggcacaaatattccctaattccctctggaggtttgggggtaggggtgggtgaaggctgttgtcttgcacagcttcactgtgcagcagtgtggttcacacaggaattctgatctggtactgagaacagccaggggaggctggcagcacaagggagagaccagaaaacatggatgcaagtttaagaggctctagacattgagatcaaggaggagctaggaagttaggggccagatggccgtcagtgaacacagatagaggagataaaatcgaagggatgagtcaaaagccagccaaaatccagaggttaaggaagtcattgtcatagacgcatagggctctgttcttgcatctacctttcgttagctggatgactttggtcagcaccataatatcttcttggcctttgtgtttttatttttaaaaaaaatcatactgtatgatcggctcaactcattgggatagacaggagaatgaatatgaaagttgcttggaaagtacaaagaacaatgcaaaggatgagagattgttgtactgtgatactttctaacacatacaaactagggattaaaataaaaaaaaaaaacagttcaattgcattaaaaggaaaaagtatacattgacatgatacaaattaaatgaaattaagtatttccatattgctcaaacaaaagtcagggactactgacaaagttgtgaacttggtaaaatttctac

SEQ ID NO: 483 - DNA, 4027 bp, Homo sapiens
aattcgcccagtgttattgtttaataaacatttcccatatgtatggtgtttttttctcaattatgatatcaacatttgtaatctccattgtggcttttctacacttacgttttaaagcccaatgtcaagaatgttttctttccttccatattgattttatagtagccagtctagagattggtatgtcctcagtatataattacttaattgagttggacggaattgaatttttagtgctcctctttattgagaacattcaactttacacttttaagtggacatattttcacttcatttttcttcctccttctcacatctgtgtaaagcacttacaaaaaaactattgtgaaatagaaggatcaaccttacaaagtcatttcaggtatggtaattccaaataccttatttatactatttgcttttttgcatgtatctataatcttattgttttattctaccaaaagacgaaaaggaaatattaaaacaatcaagtaaagaaaaaaattcacaactggcatttttactgttggacaatttggtagaagaaaagattaggagattgcatgccagttccaatactaactagttacataatcctagatatattccttatctctttcaacctcagttaatacatagaaagctactggcacatgtgtggcacacagtaggttcttgaggaaggttactctttcattcctttttactattttataactagctctgggaggcttagatatctgtagagattttcacataagcaaaccaggttgattagccaataagaactcaaaggaaaagacttgacttgctctctctcaatatctctctctctttacccccctcctatttctctctctctttcctcatgaccaaaagatgtttctgattaaaatattgggaaatacattatttcctaattttctgataaagtgattaagatccatttaataactctgaaatgttcaatcagtgtttgagagggccctgaccatttcctactctgtacaataactgatgacaaccactcattatgagccagattacaagtacatcatcaagtgccacggctgattagtgcttctaattatgtccatttaataaattataaggatgacaataacaagaggctactcagagcagattcacctgttaatatgtagcctaaatctttcaatacagatatgataaagatggcatagattcatccatgctgccagtggacttctcaaattctttttttttctttttttaagaaaagagaacctagatatatttagggaacatcaagacctcaaaagtaaacagatttagggactaccttccacaaatagtaaatgcaagttattaagagaggggacacaaatgaaggggaactcagaatacaaaacacgctttggagggagctacatggcaccactgacctgaagtcaatagaggcagaactggagtctaaatacattcaaggtttactcttcttgtgaagtggccaaagtaaataagcccagagttgagtggaggaagaagcaggggccaaccactagacagacgcaactccaaggaaagaagcaggaagagcaaagagaccctggaacagacaaccagggcctcgctaagcaacctgagatctttccattttcttcattcaggaataatccctgaatttcctccaagtagtggcagttttgcgatttattcaagtgaattcctttgggctggacatcaacagatgggtcactgggggcaggcaggtggcaataaaaggaaagaggaaaagctgagaatgtttcaggaggaaaaaaacatctgttttgcctactactgtatcccgagtatctagaacaccccccttgtaaatggtaggcactcaaaacgtacttgttaaatgcataaatcaatctctgtacaatatctttaactagaaaaagaaaataaagaagaaaattctcccctttctctttcaagaatcaaaggacaggagttttagattcaaagtcttttatttcttgccacatgactgcccatctctccccaggctgcttcccagctaaacacagcccctagtgattgatcgagctacagagaagtctggagctttctacccatgctctgccattcttataagttaaatatggcttatgtttatgtactgccaaaataagtgatgagtttaattgaagaggagaattcatgcctttgctaggattatacttcttaaaaaatggcaaaacctctaattcttggaagattccagttttctactaagaacaacaacaatcacaaaacataagtacattataccacgctcaaagagtcttgtatcctccggtcctttatgtttaaatcagaaagtaatgtctcagatgctgattataataaaatacacacgtgtaaacgattgccatctttttatgaggcaaatgtgatttatgaatggctgtaacactgattagagaacataacagatggtaaacaattaattgaaaatgctatgtctatcaaacaaatctttatcatataattcttcatgaagactattgtttatttaaatgagattttattactacagtaggagttagcatgaaaaacattttccaaatttttacccaatcgatgggcttactcagctggctcgttgtattttagaaaagttgaagactagatgcattatattcatacagatattatagaactttaatttgtgaaaaatcacattactgctctgtagttaagaacaccggaaaagaaagtaacattatatttttctgcgctttttcatgcattacaactttactaatctaatttggacttgagaagctaatgaaattattgtcgtggtctataggcctgaaagcaattacttatacttcaaatttttatatgaaaattaaaaagacaaagtctaatattgcctagacaccttctccctcggtgttaggaaatcagtgaactgtttatgattccattatgcagcgtggtatttcagtgaagaaagagcaacaataaagaaaaaagcaaagagttataaacatattcaattactgtgtgaattattttaaaatcgaagaaaatgaaaataaaatgttgtttctattgaatagctacaaatactaattattacggaagtagtttaagatagtacactatggcagttaagagcatcaagttttgtgacataagccttagtttgtattttggctctgtcacatagaagacagtatgcctctaagcctctcagactctcagtttcctcatctgtagaatgggtggtaagtattcacccttcaaggaattattatgagaatgcaattaaacaaggtaggtaagtttcttggcacagtgtgtggcacatggtcagcacctgtgaaattctggcttgttgggaatgtctgcatttactaccatttttcactttccccttcctttatgggattggattcttcctccatttagcatgatattatgaagaaggtctgccaatcctagcagtccctgagtcccatgttactcgggccaagtcaaccagagccctctcctggaatattctggatctaaagaagggtgagcccttcctggtatgaggttgtgagctatacagtcataggaaagctaagaaaatgaaaacctgtacagagaagcagagaagaagacatggagaaaagccttctgggtggtattccagtccctgtggtcagctacgtctctaccgtggctcggttatggaggccaatgccttccccttcatgcctacacttagggaagctgtgtgcctgtcatttacaatgaatgaggctccaattaataaagttgttagtgaggaaaacaaaagccctgggagaaaacacccattagttttactagcccagttacttctattaactaatgtgtaatttgtcctcattttattacatacaagaaaataatgttgtaaccttaagttatatggagaatataaaagtaacttctactaaactatataataatttcaaatcttcactcatttaataactatgaaattgtatttgca

SEQ ID NO: 484 - DNA, 4035 bp, Homo sapiens
taagccaccgcacctagcctcttacttatacttttatatttatttatattatatatttatgtatcatgtattatgaatattattttatattcatatttcataatttttaaacaccaatttatttattgcattacaaagctatttaagggaccacagataactatcttttagaaagaagaaacaggaagaagacaaaggaagagaggaaaaaggaaagatcaatcctgatgttttctgtcatccaattacctttacttcttcaaatatgcaaattagtggcacagcatttatgccacgctctcctttataccatgaggaagaagactataatacacttccctagaatgcaggtgaaaaaccaaagctggaccaggaacagagactaggatttggaatcagtcctgctcccattttgcccattgcccctaggccagttacttgacctgcccagcccaattttatcaagtgcaaaccctattttctcatgctagaaaaatattttatttcaagagtctattttacctcaattcaattatgtaagaaggttgagcctctgtatatctcaaagaaatcttgatagtagaggaaaaaaaactcttcctttgagtgcttatgcaaagctattttttaaattttaaaaatgaaactatgtttctcccatgaaataatgatagatatttattagaattcgcccagtgttattgtttaataaacatttcccatatgtatggtgtttttttctcaattatgatatcaacatttgtaatctccattgtggcttttctacacttacgttttaaagcccaatgtcaagaatgttttctttccttccatattgattttatagtagccagtctagagattggtatgtcctcagtatataattacttaattgagttggacggaattgaatttttagtgctcctctttattgagaacattcaactttacacttttaagtggacatattttcacttcatttttcttcctccttctcacatctgtgtaaagcacttacaaaaaaactattgtgaaatagaaggatcaaccttacaaagtcatttcaggtatggtaattccaaataccttatttatactatttgcttttttgcatgtatctataatcttattgttttattctaccaaaagacgaaaaggaaatattaaaacaatcaagtaaagaaaaaaattcacaactggcatttttactgttggacaatttggtagaagaaaagattaggagattgcatgccagttccaatactaactagttacataatcctagatatattccttatctctttcaacctcagttaatacatagaaagctactggcacatgtgtggcacacagtaggttcttgaggaaggttactctttcattcctttttactattttataactagctctgggaggcttagatatctgtagagattttcacataagcaaaccaggttgattagccaataagaactcaaaggaaaagacttgacttgctctctctcaatatctctctctctttacccccctcctatttctctctctctttcctcatgaccaaaagatgtttctgattaaaatattgggaaatacattatttcctaattttctgataaagtgattaagatccatttaataactctgaaatgttcaatcagtgtttgagagggccctgaccatttcctactctgtacaataactgatgacaaccactcattatgagccagattacaagtacatcatcaagtgccacggctgattagtgcttctaattatgtccatttaataaattataaggatgacaataacaagaggctactcagagcagattcacctgttaatatgtagcctaaatctttcaatacagatatgataaagatggcatagattcatccatgctgccagtggacttctcaaattctttttttttctttttttaagaaaagagaacctagatatatttagggaacatcaagacctcaaaagtaaacagatttagggactaccttccacaaatagtaaatgcaagttattaagagaggggacacaaatgaaggggaactcagaatacaaaacacgctttggagggagctacatggcaccactgacctgaagtcaatagaggcagaactggagtctaaatacattcaaggtttactcttcttgtgaagtggccaaagtaaataagcccagagttgagtggaggaagaagcaggggccaaccactagacagacgcaactccaaggaaagaagcaggaagagcaaagagaccctggaacagacaaccagggcctcgctaagcaacctgagatctttccattttcttcattcaggaataatccctgaatttcctccaagtagtggcagttttgcgatttattcaagtgaattcctttgggctggacatcaacagatgggtcactgggggcaggcaggtggcaataaaaggaaagaggaaaagctgagaatgtttcaggaggaaaaaaacatctgttttgcctactactgtatcccgagtatctagaacaccccccttgtaaatggtaggcactcaaaacgtacttgttaaatgcataaatcaatctctgtacaatatctttaactagaaaaagaaaataaagaagaaaattctcccctttctctttcaagaatcaaaggacaggagttttagattcaaagtcttttatttcttgccacatgactgcccatctctccccaggctgcttcccagctaaacacagcccctagtgattgatcgagctacagagaagtctggagctttctacccatgctctgccattcttataagttaaatatggcttatgtttatgtactgccaaaataagtgatgagtttaattgaagaggagaattcatgcctttgctaggattatacttcttaaaaaatggcaaaacctctaattcttggaagattccagttttctactaagaacaacaacaatcacaaaacataagtacattataccacgctcaaagagtcttgtatcctccggtcctttatgtttaaatcagaaagtaatgtctcagatgctgattataataaaatacacacgtgtaaacgattgccatctttttatgaggcaaatgtgatttatgaatggctgtaacactgattagagaacataacagatggtaaacaattaattgaaaatgctatgtctatcaaacaaatctttatcatataattcttcatgaagactattgtttatttaaatgagattttattactacagtaggagttagcatgaaaaacattttccaaatttttacccaatcgatgggcttactcagctggctcgttgtattttagaaaagttgaagactagatgcattatattcatacagatattatagaactttaatttgtgaaaaatcacattactgctctgtagttaagaacaccggaaaagaaagtaacattatatttttctgcgctttttcatgcattacaactttactaatctaatttggacttgagaagctaatgaaattattgtcgtggtctataggcctgaaagcaattacttatacttcaaatttttatatgaaaattaaaaagacaaagtctaatattgcctagacaccttctccctcggtgttaggaaatcagtgaactgtttatgattccattatgcagcgtggtatttcagtgaagaaagagcaacaataaagaaaaaagcaaagagttataaacatattcaattactgtgtgaattattttaaaatcgaagaaaatgaaaataaaatgttgtttctattgaatagctacaaatactaattattacggaagtagtttaagatagtacactatggcagttaagagcatcaagttttgtgacataagccttagtttgtattttggctctgtcacatagaagacagtatgcctctaagcctctcagactctcagtttcctcatctgtagaatgggtggtaagtattcacccttcaaggaattattatgagaatgcaattaaacaaggtaggtaagtttcttggcacagtgtgtggcac

SEQ ID NO: 485 - DNA, 4029 bp, Homo sapiens
agttatgtgccacagtggccagctaattttttttttttttttttagggatgaggtctcactatgttacccaggctggtctcaaacttctggcctcatgtgatcctcccacctcagtctcccaaagggctaagattacaggcataagccaccgcacctagcctcttacttatacttttatatttatttatattatatatttatgtatcatgtattatgaatattattttatattcatatttcataatttttaaacaccaatttatttattgcattacaaagctatttaagggaccacagataactatcttttagaaagaagaaacaggaagaagacaaaggaagagaggaaaaaggaaagatcaatcctgatgttttctgtcatccaattacctttacttcttcaaatatgcaaattagtggcacagcatttatgccacgctctcctttataccatgaggaagaagactataatacacttccctagaatgcaggtgaaaaaccaaagctggaccaggaacagagactaggatttggaatcagtcctgctcccattttgcccattgcccctaggccagttacttgacctgcccagcccaattttatcaagtgcaaaccctattttctcatgctagaaaaatattttatttcaagagtctattttacctcaattcaattatgtaagaaggttgagcctctgtatatctcaaagaaatcttgatagtagaggaaaaaaaactcttcctttgagtgcttatgcaaagctattttttaaattttaaaaatgaaactatgtttctcccatgaaataatgatagatatttattagaattcgcccagtgttattgtttaataaacatttcccatatgtatggtgtttttttctcaattatgatatcaacatttgtaatctccattgtggcttttctacacttacgttttaaagcccaatgtcaagaatgttttctttccttccatattgattttatagtagccagtctagagattggtatgtcctcagtatataattacttaattgagttggacggaattgaatttttagtgctcctctttattgagaacattcaactttacacttttaagtggacatattttcacttcatttttcttcctccttctcacatctgtgtaaagcacttacaaaaaaactattgtgaaatagaaggatcaaccttacaaagtcatttcaggtatggtaattccaaataccttatttatactatttgcttttttgcatgtatctataatcttattgttttattctaccaaaagacgaaaaggaaatattaaaacaatcaagtaaagaaaaaaattcacaactggcatttttactgttggacaatttggtagaagaaaagattaggagattgcatgccagttccaatactaactagttacataatcctagatatattccttatctctttcaacctcagttaatacatagaaagctactggcacatgtgtggcacacagtaggttcttgaggaaggttactctttcattcctttttactattttataactagctctgggaggcttagatatctgtagagattttcacataagcaaaccaggttgattagccaataagaactcaaaggaaaagacttgacttgctctctctcaatatctctctctctttacccccctcctatttctctctctctttcctcatgaccaaaagatgtttctgattaaaatattgggaaatacattatttcctaattttctgataaagtgattaagatccatttaataactctgaaatgttcaatcagtgtttgagagggccctgaccatttcctactctgtacaataactgatgacaaccactcattatgagccagattacaagtacatcatcaagtgccacggctgattagtgcttctaattatgtccatttaataaattataaggatgacaataacaagaggctactcagagcagattcacctgttaatatgtagcctaaatctttcaatacagatatgataaagatggcatagattcatccatgctgccagtggacttctcaaattctttttttttctttttttaagaaaagagaacctagatatatttagggaacatcaagacctcaaaagtaaacagatttagggactaccttccacaaatagtaaatgcaagttattaagagaggggacacaaatgaaggggaactcagaatacaaaacacgctttggagggagctacatggcaccactgacctgaagtcaatagaggcagaactggagtctaaatacattcaaggtttactcttcttgtgaagtggccaaagtaaataagcccagagttgagtggaggaagaagcaggggccaaccactagacagacgcaactccaaggaaagaagcaggaagagcaaagagaccctggaacagacaaccagggcctcgctaagcaacctgagatctttccattttcttcattcaggaataatccctgaatttcctccaagtagtggcagttttgcgatttattcaagtgaattcctttgggctggacatcaacagatgggtcactgggggcaggcaggtggcaataaaaggaaagaggaaaagctgagaatgtttcaggaggaaaaaaacatctgttttgcctactactgtatcccgagtatctagaacaccccccttgtaaatggtaggcactcaaaacgtacttgttaaatgcataaatcaatctctgtacaatatctttaactagaaaaagaaaataaagaagaaaattctcccctttctctttcaagaatcaaaggacaggagttttagattcaaagtcttttatttcttgccacatgactgcccatctctccccaggctgcttcccagctaaacacagcccctagtgattgatcgagctacagagaagtctggagctttctacccatgctctgccattcttataagttaaatatggcttatgtttatgtactgccaaaataagtgatgagtttaattgaagaggagaattcatgcctttgctaggattatacttcttaaaaaatggcaaaacctctaattcttggaagattccagttttctactaagaacaacaacaatcacaaaacataagtacattataccacgctcaaagagtcttgtatcctccggtcctttatgtttaaatcagaaagtaatgtctcagatgctgattataataaaatacacacgtgtaaacgattgccatctttttatgaggcaaatgtgatttatgaatggctgtaacactgattagagaacataacagatggtaaacaattaattgaaaatgctatgtctatcaaacaaatctttatcatataattcttcatgaagactattgtttatttaaatgagattttattactacagtaggagttagcatgaaaaacattttccaaatttttacccaatcgatgggcttactcagctggctcgttgtattttagaaaagttgaagactagatgcattatattcatacagatattatagaactttaatttgtgaaaaatcacattactgctctgtagttaagaacaccggaaaagaaagtaacattatatttttctgcgctttttcatgcattacaactttactaatctaatttggacttgagaagctaatgaaattattgtcgtggtctataggcctgaaagcaattacttatacttcaaatttttatatgaaaattaaaaagacaaagtctaatattgcctagacaccttctccctcggtgttaggaaatcagtgaactgtttatgattccattatgcagcgtggtatttcagtgaagaaagagcaacaataaagaaaaaagcaaagagttataaacatattcaattactgtgtgaattattttaaaatcgaagaaaatgaaaataaaatgttgtttctattgaatagctacaaatactaattattacggaagtagtttaagatagtacactatggcagttaagagcatcaagttttgtgacataagccttagtttgtattttggctct

SEQ ID NO: 486 - DNA, 4041 bp, Homo sapiens
gtttcaattactgtgatttatttaaccttttgcaattttctacaaatatcatatgaatagtacatcaaaaaattaaattaaactctataaataaatgaggcctttaggttcaagatactgaaagacaaatacctgatgtcatcacatgctaaattcattatcaaataccatcagcaaagaaagagaaaacggtgagtggtaatatagtgaggtagggtttaaagaccacccaaggtgtaagcctgcattatgaaggggaataagctgatacctgtaaaagtttccatcgcatattaaggtcatctagctggcgagacatctttagagagggatgcaggtcaagtggagacagctgactggataaatcattcaccgttttaactttaaagttgattggtgcaatttcttctctaaatgcctagaagaaaagaacaaaaaatatattattggaaacgaatataacaaaagctaatacagttgatccttaaataacttaggtctgaactgcatgggttcacatatgcacagatttttctcaaccaaacttcctgggtccatttatgcacagatttttttcaaccaaacatatggaaaatacagtatttgcaggatgcgaaacccatatatatatggagagctgacttttcctacatgcaggttccatggggaaatgtgggacttgagtatacatgagttttggtacatgcggggtcctggaattgtacttccaaataaatggcaaggccagctcagaggaaatcaactacagttgcccactcaacaacagctgacttaattcaggtcttcagtaacttggatgaagaaccaaaaagtcattgtttattacccaaaaatataaataaatgtgtgaagagaaaaattataattcaaacttttaaaatgattatgtatttcctttcatgctttctattatatgcagtttactctggaaaatgtatgccattattttccactttactgatatctaatgttgattctatctttagtttgtattcgtgttttctttttattctgttttaacatagctaccttaatattttttcaccaaatgcaacaacttgattttaacatgtttccacttaaaattaaattagaaagtggccagtagaaacaacattcctaaccatgaaaccaatgcctattacagactcaagaggtaagatctatccctgtcaaaatcatttataatcactgtctgtggttagggcttgggcaggaagagtggagtctacagaaaaaaggtaaatgagtcttagaattgacaaatgccacctctgagcaaggtctagaatcattaaaacaacttactaagagcacttagaaattgtaattatgagcatccacattcttgacgttcccagtaaagaatggaagctgcttgggaatagaccctcactattcagcacagaacttgcaatccaagagagacagaattaatttctattgacaaaggcccacaaaaatgatatttgagcaatattaagctaacacagaatggataatggaactgggatattaaaagaaaacagtttaaatttaaattggccacaaaattatagttaataatgtaccaaactaaatttagaagtagtaggtgttgtaaacatcccattagctttgccctcaggtttcctcatttctacattgtccactctttaagtggggaggctctttaagtctctttaagagactagagtcagggtgagaactatgaatgttggaagtttgaagtcaacatgtgtaaagtaagaaatattaccgaaccctgcagctaccaacatttcaaagacagggtagaggaagggatgcatacaaattcatgggaattgcttcagtatggaaggagaagaagagttgagatagttttttttccattgctgcagattcggcattttaatggatgacagaatgtgcacacacagaaaaacacacaaatacaattaaataagaagagcagttgtatggtaatagaggcattataagtgtaaaaaattcacaattaatatagaagcacagggaaggaggaggggtgggttagggtgggcaaagggatttttcagtctgaactttgaaaaggtctgggtctctcagattcagtttgagaacaattacagaattcaaatccttcaaggtttctttagtcaggattttagctatatgcattaatattctctccatgggtaggtaccttggaggactcaagaactgtaattagcttttaaaatcaacatctttttatttttatctattaaagattaaaaatgaaatgccagaaaatgttttgagatgcatataatttcaaataatagcctattttatttcaaaagatagtaaactttaaacaaatagaatataacttcaagacaggctttaaaaatcttttggaacaaaaaagaaattcaaatttttcctctccaaaaataatgtttccctatataagccacaggttaaaacatttaaaaagctttgacaaacaaggtctttggtttttgtttttctttttatggtcaggtgttatatggcaatgaggagtctttctatcaagaaagtttatcttttgtttttgaagagcttccaaattaaggggctcgagataaagcaagttttaaaatggtttcagaactgctgtgtgttctagcataaagaacctatttatcatgttatgactgcactttcctataacagaataaaagactatgtggccttccttgccataaaaacagaacatctgctagtatcaaaggtgctaactggaagtctgttggcaggtgtgactcctaagcccttctcctgccagaaggtgtgtattctgtaaataagaacgattaatgataattttaggcagttaacattatttgattacccccaaggatttcgttttccagttgttttgacatatttaataatatttagcaaaattcagtacttatttttatctgactacactgtcaatgagatttggggtatactttaaaccatctcttatatctcttattgtctaaattttattaacttttttttcaggagatgttctagaatatgggaaccaaaggggaggtaaccataagtctaacatccatagctttgggcaattccttactacaaacagaatttatagctaaactaattcttcattaatatacaataagatacaatttatagatgagagttcccagtaaaagagtgtgcttttgattaaatctctatctccatccaccaatttacaagagataccgagtagagaggaacctggagactataccatatggacacaattctgcaaaatccaggctctgggaatcaatacaaaacaaacaattcagtgtctttaacaaataaactgaaaaggaaaaaggaagagaggggaaatctggggattaaaaatattttttaaaaataggtaaacctaatctacattgtctagagatgcacagttggataaaaaataaaaataaatgtaaattatcataaaagttgcattagttgttatttgggggcagggggttccaatgaaccccaatgagggtcatatggaaagcacctgtcctgactcctgatgggtggggttgcagcggcgttggctttgtaacaatcccttataacaatttatatacgtggctctctttatttgtgttatatttaacaagaaaacatttcttaaaaatccttcaaagacaatgatgctgaccatgattttttcaatgtgatcctgcagcgagtcaatgagtaagtctcccacgggcttccagccattccgcacggactctgcctccttcatgtcagcgtccaggtcatccatagctccctgcaggtctctgagtttctccaatgccttgtccacttgcttttgccaattgctagttacagcatttagactttcccatttttctttgacttcagaagactgtttgcgcatggctttggcaatcttttgggctctctcctcaggagttaattctgtgattaaaaaaaagaaaaagaataatttggatgtctgattatatattcttaatagccaag

SEQ ID NO: 487 - DNA, 4048 bp, Homo sapiens
ttttactggtgatggagaagatttttttaaatgctacagtcctaaacgttattatttaaaatagtggccatcattatattatatctattttccagtgctggtaatagtgctctagccaatgggaagccaggtaaaactaacttttattctaccaatctgccccataagaactctgccccacaagaacaagaatacaatcctaccagatccttccaaaattataaacattttgaattagagaaattctgatttagacaattctcagtcatatataattaacctaaacatatagaaattcatttttaaaaaagagctaaaattaaggatggactttaaaagtcccaaaccacacagataatcatgatataaacataaagcaagatatttaattttttttatttagtaaaacccaaaaactagatccagtttgcatttttaaaaaaatcagatgataaaagactctaagtcaattcaataaattaattaatttcaattaatttgcgtgaacttcttgatttttttatagtacatgcattaattttctattgctgttacaaaaatgtctccctgggataaaatcaaagttggcagggctgaattccttctctggaggttctaagagagaatcccatttctttgccttttccagcttctagaagctgcctgcatttaaggatcatgtctgcttcctttaccttccaagctagtagctagcattctcaaatctctgcctcccctgccacttttaaaggcccctgggattacattaagcccatcaggataatccagaataatctccctaattaaaggtcagttgatttgcaaccttaattccatttacgaccttaattctcccttgctttgtaacctaacattttcacaggttccagggattatgatgtgagcatctttcaggggttgggagcagttattattttgcctaccacagtacatcagatttatatctaaatttgtaagattaaattcaagtcaatattcaaccaagcaaattaaagttctctaatactattactattattattgttatagtgtacaataaaaatgtaaacagttttaaacattttcagttagataatcacatcttctttcactagagacatgccaacttaaccagcgtctgacctctttccattcttacttgggcaaatttgacaccaatcaattgctttaataccttgttctcaactcagttcacaactcagtgcattgtaggttatacactgataaaaatattaaactcccataagctaatgtaacgtatattgcttattatatttattatatattatgcaaacctgttttttaccctgagcttacatctcagactgtaataaaaaattataagaaaagactatttcaccaacatggacttcacacaacgttttcaggaagtatactggaagagcagattattagcatttgtatagattttggagataccacaccccatgttagaaatgataaaaaggaaacttggcccagagatcttcatctgacttacctgaggtcacacagctaacctgagacagagctgtctcctgacaataagtaagtgttgtcatgattatgatgctgttcgtctgacacataaaatagggtcaactatgactcatcactagagcacgttgtaaattaatatctttactaagttacactccaagggactatagaagtagaattttatcattctgttccatgacaatatatagccctaagccaaggatcaacgcctactaagagcctgtgtaaattatacaaaacttataaaatgtcatataagaagaagaaacagtatgcaagaaggagaaactaactggacaacagaatcaaagaatgatgagcctatgctaataatgcagataacttctataagacaaagaaaaacttgacaatatttcactttttcatgataaatcattatttcttattggtggaataaaatgacaagagtataagacatttttatatggattttcttagaggaagaaaaatggtttagaatttgtacaatttgacaaatatcattatgtcaagagtattttgaaattctgtcatttttctccaattttttttttttttactttttagagactggatcttgctttgttgtccaggctggaatacagtatggccatcatagcttattgtctgtctccaaatatttaaatctctactttaaaatatatcagctaaacacacctatatccctaatctgatacatgaaaaatataattctcatgttaaaagtagtttctttttaatattaactatatcacagtttctttcagataataggactgaattctatttttaaaagttatggggagagaagcctcttaagttatcaataaaacatgattttcttggtatcataaaggagaattaaaatcaacttacttgatgtaatagggcactttattatgtgaaatggatctttgccacggcagctggactgacgctgaggaaacaaagggagattattggaaacgttggaaaccaaaaagccttacaccttaatgcaaaacaactgaacattttatagcaaattcaatgaactgctctggtttctgagctggattcctataattatgagatccactgggccaaacaaaaaatggctttaaggattcatttgaagtaaaacaagaaacaatacaggttcaaggtctaatgccaactaatctaacctgttgataaaaatacttttaaactttcaaatggtgttgcttataaatactacagtttaaaccttagtgccatctggaaactgtactccatatatatttttgataaagctaaaaccaaaattaattttacctggtatatccagattaaaaattagatttttcaagaccgaattttccagatgactaataacattgtttactttgcatcgtagtcacaggagtagctattgagtacagatggcatttaagtaaattcaattctataacatttaaaaagaaggaatttaaaaataggcaaaaagttgtgaagaaccaaggcaatcgtctaggcagaaaaatcccaatttcttactttcatctgaaacatacagagagcccagtctcctacttttgcactagaccttactatgactgagattttatggggtttttaaattgaggtactttttttttttttttttttacaattctagttacttcttacttataaaaaatatattattcctacattaaccaattattttaagacttatttaagaagaatagtacatgtgaatttagtgccataaaagaattttgctaaatgaacaaatataaaaattcaaataatacttggaattttcatactttgcaaatatcatcagatcctcacgtagccagttgtcaccaatactttttttctcaatttcatgtcacattaatatcttacaactattcagcattctaaactttgccaagcattttcaaatatatgttttcggtaaggaagccagcaagatacacgttaaagttccatttgatagatgaggaactaaatgtgtagagataaaataacttgcccaaagagtgacagccagtaaataaacggtcgagctcagatgtgatctcaatttctgaacactagctgagcaattcttctactcaacaattcctcctctctttataaaaggcaagcactctgttctcaatctatgcccaccaaagtataaacagggatgaaaatgaggaagtaggtatgttacatttctcattagagccaacctcatttcagtgttggcaccaggctaataggtcagtttttattttgtgcctaactaaacaggcttcttttataaccatggctgaagtccaagaaatataataaagccaaagattccaagcagcaaaggataacaattattaaatgtattaattgggactttgtttacacttccccactcattttaataattgttttgatttgaataacttctacctccttggattctcagtgttagataatacaaggccatgtatttgacttttacaaaaatgtgtataaatttcacaatatttcactt

SEQ ID NO: 488 - DNA, 4039 bp, Homo sapiens
gatcaatgcaggctccagaataaacccatatctgttaaacagatgtagattatcattcagaacgaatcctccaacagcagaagtagtgctgtgggagtcactacaccttaaaagtctcgtcatatttccaaagattgcagaaacaagtttaactctgaataacatcatcccacaatctacagagcctccctcctcttctaccttgagtcgaactttcctcagtgcaaatctaccctttcttctcttcatgtgtatctggattccccactcccctcaggcaagtgtctcttgccacttagactctgtgttcctcttctcagcttcctctcattaaccagtattattattttctatatgtattaaattgttttcctcatgttcttcactttaaaagcaagttttatactttctctttttctgtaaatttcaaaactaattcatatgttagatggaagttttggggtaataaattgaggttaaaacataaatggaatgcttcaattaagtttcttaggtaaacagttcatgactttggtgggtcagtggccttacatttaaaaagagttaactgccccttatctaggtcagggtagattcataacatttaatagtgctccaaagacttcttaaatgacacctagttcttataaaactatttagtaaactaaatgaaccagcatagtacctaagagagtgatattacaacattcataaaatcaaattcaagagaaattatttttcaagcctatgtaatatatcaaaaactggggcatgtcactgggaaaagaatatcatcactgttatatatacacaggtaacaaaaaccccaaataactcatacttacctttgaaaaatatttaaagtgtgtatttgcagttgggtacgtatcccggaaatattagcaattgggtatgtatcctggaaattccaagatctcaaacaaaataatgtaactacaatgtgaagatctgtcttggaaagagatggaaagttgtcgggctcctctacccagattcttgactccaatgcagagacaaatacttctacttcatggtccactactgaacaccaacaaaaccattccaccctttcggtttgatggtagtgatactacaaattgctcaaaagaccatggagccgggtactgaagttgtttgacctaaattcttactattcatcattaggctcagagctttacagaaatgcagagtctcaaaaagaatttcctccctattaccaacaaatatggaaggatttgctgaggaggtaatgcaattccagtaaggcatcatgggctcccagtctgagagaacctactagggttcattgatctcttgtcttctctttcagggaatttcaatccccacgacaacagtactgtccagagacagacatcccatcatgatggagcaaaccaaggctcaagaaccaaactaaagccatcggtaatgtagagccagacgttatacttaaacaacaaatatgctttctctggaattacaggtgtgggtcttcacctcacacaacccctacggaatcacaagaggaaaataccactatttctcagtcaggcggaggactaagaattcaaggtgaacacctcttgctaatggctctttttagtgaaaccactactgagagctgacggaacacacacatttggcaaacagatggagggagggaacgggcatctccctttgtgaattcaataccagttgattcattaggcagaactgccaacacagaaaataaatacagcctctggttacaaaagtataactgctgcttaccaaacaacagaaataaaaaaaacaggcaatgcagttggctgctgttttttttttaagtcgggggagagggttaaagcaaaatccacaatgaacccaaaggcttaaagtatttgaacagctgcagatagctcagctcctcttgccaaaatgcctgaagttctcccagagtaggcaaccaaaacagaataaaagtagcattttcccccaaaataacaacagcttgggttctaattaatctcaaatatgaacagggagtgggacttcatattgtgcagcttgataagctctaaaataaaattatgattttattactaaaaatcctctctttaaaaggcaacagccatgggaatctatccaagaataaaattaaaaaaaaaaaaacaaaacaaaacaaaaaacaaagtagcaattaacagttaagtacaaaatcatatgaagcaaacaatagtgagaacatgtgacatgtaactaggctggccagccatccagttttgcctgtgcagggaaaaattgtgaaggtctttgttgtgggcaaaaaatgagtgggtatcctgcaaagcttaaattatctctgagctattttaaactctgcaaactgaagaaaacagatagtaatgcaaatgatttctgtccatataaatgcaaattgtgcccagtggaatgcaattgattattgtcctgtggatattgaccagtttgtcagctttgcatccagaggtaaattcattttagcatccctaatctcactataaatatgtgacattttgtattctctttggaacctattataacttcttactggttcccttactatgagttaaatgaaacatgctctttttgtatttgtataagagttaagatttttgcctattttgaaaactatccttcaagcagtataaatcctgctttatactagactgtatacaggaattacatatcagcatcctggtataattattaaaagtgcccccttactctgaagagccccagctgggataacatataatctctgcattttatggacattattaaaatattaagccaataaggttaagaagtagtatatccttccacctatctattattattcataacaatataacactgataagccacagaaagtaaaacacaaataatataagactgtagcaccaacaaataaaacaaaaaaagttgtgctgcaatactgcctaacatgtaacacaatgaaccaacagcaaaggacatgcacttttgataggctggtaaaatcttgatttctgggcaaatgactgctctgtggaagatacttcttaaacccatttgtcctcattagagtggtctcatatttttccatgaaaccttaaaggatgatcagaaggcaacttgtttctccaaaaactaacacttacccaaatatacttatttgttactagctatccaattttatgcttataactggattttgtgaggtttgttatatatcattccattccaattataattataaaggcatataacagaacaaaactaaagataagtaaaaatacaaatgtggggacaagaactatgtatattgctctgagataagacaatcaaagaaaaaaatatttcttctttgctgtgcaaagtaaaatatactaggtcaggatgtatattaatcacagtaataacatgctatttgagtgctcgatttgtaccaagtaaacttttttggataaactttttctatgtgtaaattctatttggattacaattctatgacttgggtgacaatattgtctccatcttacagatggaaaaaactagggcagagagtgcttagatagcttgtctgaggtcctatagtaagtaatagaaatgggatttaaacagagatagtctcattttaagctaagctcttgatatggaagtatatttgcataattaaggttttaaaatatttcttgatgaatctgtccaaatttgagtccatggtctatcattagaatcattacaaataacctcatctcccttgcttctctctcaccccttgcaaatcccaggcctggatcagctcaattacttgcctactctggacctgagcagctgtggataaaaacaactggagaaaatcactcaacagacagactcaatttactttaaaatatgtgatttcaaacctcaaatgtccaactcctggcaactgcactatattccctaataaacttgctttcccaaactccaaaacagaaattcactactgctatctctctccccaaactggttt

SEQ ID NO: 489 - DNA, 4045 bp, Homo sapiens
ttgtcactaaggtgagagaacctgctattacaggcaatcataaactactgggaaaaaatgtggagacgggtaggattagcttgtaaatgtttccaaaagaggtaaatctttaacagtatttgggaggaaaaaagggttacaagccagtgcagagaaagggtcagggtatttctagtaaactgaaaggaagggagaggaagaagcagattaataataaactgatgagctccaggagtggcccagaggccttggctggagggcagtgggagaaggctgtaggaaaagtgaaggtcagttggctctgaaaaaagcacctcatatacttgaaatccaatacaatctagcccttttctaactgtcatttagttgtttaattgtcattaccaatctcgtttagtttagaagttggagaagcgtcccttctgttcctctcaggtttgaggggaagagctgaggagggggtttttttcttcaggaatccaaagaaccaagagaagaaaacaccaaatgtgttaatatgcttatccacccataagtgttgtcgaaaactgggaccatgttcataatgacaaaaagcagtcttctgtcaatggaaattttgtggctgagtcatttgtcctcattttatagctcatcaggcctgagaagaacttccagacccatcaactggatcctggatgtgcagctgagcctctttcaaaactgctgtcaccatggactcctgcgcagaccaaacatcccttttgtgtgttcgtaatttacttcctattctcttttcgctcaacatactgatcagtagccagagcgtggtggctttcttttctttgtccgggtaattctgcaacacttgctgcaactactaccacctgctaattatctttgaggctctgtggattatgcaaaagtcaaggtcatctcattcttccttgcattgcctcatctggaggtgtctttcagccctgtagacttctcttccatacatagcttaagcttttcctattttcaagctttgcattgctattttttctcaatgacattatacctctctttcctcaattcttcgtgcagccagcttaaaatttattgctaacttctattgactttcaaggagcagatttttcaaccttaacatatcatttttcaaagcataattttcaaagcatcactgaactgcctagacgtatattaacagttaacaaaaggtagcaaagaagaatacttgaaacttttcaatttaccctatcttaaaagaacaggtaaatatcactttccacatcaactatctgacaaggcctagggtagactcaatcattagaactacaaccacaaatagaatccagatagcataaatctatatgctaagtattcacactgctacttaattttaggttattttgcgggaggaaatatccttttgatgaaaggactgccacagaattccactctgaacacatcctccacaggaaaaatgcattgataatactaaatgtctcaagatatatttaaaagaaaatagagccttttatctcacttgttaaggtgccagttcaaatttagatcaggaatgtgattttttagtgtttctttatatatagtggtattgagacaaactggaactctacattgccaaatgggcaaaaggtactgaaaacacatgacttaatactttctttgatttaatccttttaaattgggtggcagcacaatttttgaaaaagctttttacattactcctgtgttttggttaattttgttctccaagtaagaatggcatgtgttcagtactgcacactgatggggcaagtaataaaacatttatagaaacaaaaccaactccttgagtgaggtacactgaagaccagattaacttggcaaacactccatcctcttcatttatcttcctcttggaaaaaaaaaaaacgcaattcaagtaacagattgattaactttggtagaataactcacaacatagtgctttttgtagtcttcggattttgattgctgtacggtaggcagaaaaacgtacattattcaggtcagctgaaatagaaaaagaaacaatttgaagataggcttattattgaatatatattgaatgcccagaatgtatttggttactttggatgatgaaaaaatattatgtttgcctgaaataaaaagtcttctcccaaattccccaacacgtatttaagaaaaaagttaaatgatcattagcaccatgttgagatacatctcaaagcagtgctacagagaaaattctaagaaagtattttcaacaggtgtcagggctcagaacatggtgggttgagtactttgaaatgaaggagactggaaggcctcagtagtaaggtctctctgacctctgggtctcttgtctcctgaccctctttctccttccaaagtgataaatagaaaccagaattccccttccccaaggtgggtcatgaaaactagaacttctcttccccaaagcaagccataaaatctagcaagttcactgtcaccttctcccttctctcctgaagattctcctgtgacaggtatcctgtccctagaggaaaggaatatgctgcagggagaagccaagaagaatctgaatagataggccttgctggaattcccttctcagtctattatcattaaattataccctttcatccaatcacaattcaatgcagtcatccattcctcactcaatctaagtgtaaaaacagacacttttccctgttttctttgagtcttctgaaggttctcatgtcaggtaaaactttgattaagtaaatttcttgtgcttttctggttgacctgtcttttgttataggagggtcaccatgacccttatgatgggtgagaaaaggtaccacccctttcagccctttggtaggaaaaagaggaaggtgatgaagagaaagcacagctgtcacatggcttattaaatgcactgcacagtaggcagagggcccttcctttttttcccaataaaggagattttcctccaggggcatcttccccaaggacacttcattttcttccaaccacactgtccagttcactattcatggagctcatcttatttctatgctcctcccatcctgattgatttggttttcctgcccttttgcagatctggttcaaatgatcctacaaccaatactcaactctttggaaacaatagatattgtaatttctttctttgtcccctaaagacagagtatcagagattagtagagttaaaagaaaactcagatatcatcaaaatttgccccctcattttacaaactaagcaaaccagttctatgtcttttgtttgtccaacttttgcaggccccttcacccaccaaaaaaaaaaacactcacacagaagcccaacatttaaagagattaaaaaagggggcatcctttttattgaaatgggagagggaggcttcgggtgctgtttttccctccagcatctccttagctacccaaagagaaaacttaaaaaaaccgctggaccaaccagaggaagtaggttaaacaataagttgaaagccacattgcactagaaattaaaacaaaaccggaattctcgtctgtgttttcttgcatttttatataaaaatgaatttagcttttaacaatttagacaaatttaaactaggtgagctaatttgatggcacgtactaaataaaaagtgagccaaaagcaaatttaaggcagtggattaaagttggctatattgtaattgtatatctatatatattttttgcgtgcaaagctgaaggttaagatgactcaatacgaaggaggtaaaaactacaattacattcctccctgtaaatcaactctttttggctcacatgatttcaaaccacacaattctcctaagaaaggcaatacctgtttactgcattgcccttagaaatttaactacttttaaatgtcaatgacatgattcttttaacattaatatgccatgtaagaaaggctggtgattagctcctatttaacaatatacagttctcggccgggcacagtggctcacgggagcactttgggaggccg

SEQ ID NO: 490 - DNA, 4041 bp, Homo sapiens
ccacttctggccctatctctaaactcccacaatacagaaaatgcctcatggctccccattctataacgaaaaatatccaaacatgaaatacaacacaataagaacttgaggaaaaaaaccgaaaggaatttcaggaaaaatatgacgttcaaattgacctaaattaactttaaggaaatttctggatattggacaaaatagctaagctattccattcagactctataacttaatgttccttgaacaccatctacaccttaattctcacacagataactccttcccttcttatccccaattaactgccccatgcctaaatcccaggtgccttttatagcctggctcatatgcccactaatcaaggaagcctgccttcttcttcataatgagaggactctccccctcctcggaacatacttcccttttgcttttctgctattacctatcacataaagtttcaaaatcaaaatacaaaggaaaacagaaaatacatatgtgtggtctaaaagaaaataatagaacaaatacccattagtccatcacacagctgaaaaaaacagaatgttaccactatcttggaagctccttgaatcctgcctaattacatcctcttacaattatggggtaaccattaacctttgtatttcactttcagtttttaaaagtgtatatagcattagttttgcatgggtttgaactacatataaatggaacagagtggtacacattttttttctgccatttaattttttcatttaattttatagttctaagattaaatcatgttgatgctgattactagctcattgatttttgttgctgtattatatttataaatatgccaaaactgaatgagttttactatgaaaagtactgctataaatctccttggacacatcttctggagtactgctatataaccttcaaactcaaatcattcactcagtgtgtcctaagcaacccctgctctgtgccagaaattgtatgaggtcctaagtagagacgaacacagactcatccatcccatgatggagaagcaaacaataactaataaacagaatattaaaaattaccattgacactctgccttagtgcctaaaccaagcaccagaagtgtcatgtaaggaaaagaacagttctatgaggagccatagaaaacctcattaaaagagaggtgatcgacaacattgagacctacaggaatgagtgtcccagccaagggaagaacagaaggattaagttggtgcaaaagtaattgaggtttttgccattacttttaatgaaataccctaacttacttttaacggcaaaaactgcaattatttttgcatcaacctatacaaagagctaagacaagtgctttttaggcaggaggaatggaatacagagtttgccatttctatcactaagtggatgatgaaatggtgatgccccggtggagcagagggaaggaggtggacagagaggtgagccaggcaaagaccattccattctgagggcagcaggaatcttttgtaagcagggcattgggtccatgtgcaacgttctcgaaatatgagttccttcagtgtgagaatcaagtctctttatagtgttttatctcctgcacaatcttggagcccaacaaatgaatgaacaatgacactgccctctgccttatgctgggtggagatttgcacataatgagagacagccatgacctaaagtagttcacagtggagatggggcaatccaccaaacattattcgagcacacaaaggcaagcacttgtcactaaggtgagagaacctgctattacaggcaatcataaactactgggaaaaaatgtggagacgggtaggattagcttgtaaatgtttccaaaagaggtaaatctttaacagtatttgggaggaaaaaagggttacaagccagtgcagagaaagggtcagggtatttctagtaaactgaaaggaagggagaggaagaagcagattaataataaactgatgagctccaggagtggcccagaggccttggctggagggcagtgggagaaggctgtaggaaaagtgaaggtcagttggctctgaaaaaagcacctcatatacttgaaatccaatacaatctagcccttttctaactgtcatttagttgtttaattgtcattaccaatctcgtttagtttagaagttggagaagcgtcccttctgttcctctcaggtttgaggggaagagctgaggagggggtttttttcttcaggaatccaaagaaccaagagaagaaaacaccaaatgtgttaatatgcttatccacccataagtgttgtcgaaaactgggaccatgttcataatgacaaaaagcagtcttctgtcaatggaaattttgtggctgagtcatttgtcctcattttatagctcatcaggcctgagaagaacttccagacccatcaactggatcctggatgtgcagctgagcctctttcaaaactgctgtcaccatggactcctgcgcagaccaaacatcccttttgtgtgttcgtaatttacttcctattctcttttcgctcaacatactgatcagtagccagagcgtggtggctttcttttctttgtccgggtaattctgcaacacttgctgcaactactaccacctgctaattatctttgaggctctgtggattatgcaaaagtcaaggtcatctcattcttccttgcattgcctcatctggaggtgtctttcagccctgtagacttctcttccatacatagcttaagcttttcctattttcaagctttgcattgctattttttctcaatgacattatacctctctttcctcaattcttcgtgcagccagcttaaaatttattgctaacttctattgactttcaaggagcagatttttcaaccttaacatatcatttttcaaagcataattttcaaagcatcactgaactgcctagacgtatattaacagttaacaaaaggtagcaaagaagaatacttgaaacttttcaatttaccctatcttaaaagaacaggtaaatatcactttccacatcaactatctgacaaggcctagggtagactcaatcattagaactacaaccacaaatagaatccagatagcataaatctatatgctaagtattcacactgctacttaattttaggttattttgcgggaggaaatatccttttgatgaaaggactgccacagaattccactctgaacacatcctccacaggaaaaatgcattgataatactaaatgtctcaagatatatttaaaagaaaatagagccttttatctcacttgttaaggtgccagttcaaatttagatcaggaatgtgattttttagtgtttctttatatatagtggtattgagacaaactggaactctacattgccaaatgggcaaaaggtactgaaaacacatgacttaatactttctttgatttaatccttttaaattgggtggcagcacaatttttgaaaaagctttttacattactcctgtgttttggttaattttgttctccaagtaagaatggcatgtgttcagtactgcacactgatggggcaagtaataaaacatttatagaaacaaaaccaactccttgagtgaggtacactgaagaccagattaacttggcaaacactccatcctcttcatttatcttcctcttggaaaaaaaaaaaacgcaattcaagtaacagattgattaactttggtagaataactcacaacatagtgctttttgtagtcttcggattttgattgctgtacggtaggcagaaaaacgtacattattcaggtcagctgaaatagaaaaagaaacaatttgaagataggcttattattgaatatatattgaatgcccagaatgtatttggttactttggatgatgaaaaaatattatgtttgcctgaaataaaaagtcttctcccaaattccccaacacgtatttaagaaaaaagttaaatgatcattagcaccatgttgagatacatctcaaagcagtgctacagagaaaattctaagaaagtattttc

SEQ ID NO: 491 - DNA, 4031 bp, Homo sapiens
tgacactttgtcttagtgcctaagtcaagcgtaaatcttcctgaagtgtgtcacatttaggtacctttaaagaactgactacatttaaatcacagaaaattatgattaagattttctcatttcaaagggagacaaatgacagctcagtcatgtggtaaatgaaacaaacagcataatcattttctatccaactttctgactttttctttaatcccacatacaaggcacaggggatggaatagaaatgcatcatcattctcctgttctgcaaaacaatgaacactgttaagcatccaatcttgggcttcagtgacacttctccaggtgtcaagctatgtggccattctttatttttttattttattattattattattattattattagcatttcccctatcttctcttccccagaaatataggcagagctcaaggtttcacatctggcatttcattctgtgagcctgaggccctcactcactcctcttacttctattattgcttctctttggatggctccagattctcttttctcctgctgatctcctgcctcaacacttgacccatgtcccattgctctgatccctacaagagctatataattctctttcaggaacctctccccataaaggcctggccttcttgtcatgatgaaatccagtctgcaaaccgtgaaatatcctaacatccttccttcttctacctgccacaatttaccaactacccaataccccgagtcatcagttcttcctcaggcagccttaaaaatccagaccctgatctcccctcctacaactcccagccagctcagctttgatcatccttcacctgaactatttacccattctctgttctctgccctttggtctttcttagatattccctaaagcatacttccacttctggccctatctctaaactcccacaatacagaaaatgcctcatggctccccattctataacgaaaaatatccaaacatgaaatacaacacaataagaacttgaggaaaaaaaccgaaaggaatttcaggaaaaatatgacgttcaaattgacctaaattaactttaaggaaatttctggatattggacaaaatagctaagctattccattcagactctataacttaatgttccttgaacaccatctacaccttaattctcacacagataactccttcccttcttatccccaattaactgccccatgcctaaatcccaggtgccttttatagcctggctcatatgcccactaatcaaggaagcctgccttcttcttcataatgagaggactctccccctcctcggaacatacttcccttttgcttttctgctattacctatcacataaagtttcaaaatcaaaatacaaaggaaaacagaaaatacatatgtgtggtctaaaagaaaataatagaacaaatacccattagtccatcacacagctgaaaaaaacagaatgttaccactatcttggaagctccttgaatcctgcctaattacatcctcttacaattatggggtaaccattaacctttgtatttcactttcagtttttaaaagtgtatatagcattagttttgcatgggtttgaactacatataaatggaacagagtggtacacattttttttctgccatttaattttttcatttaattttatagttctaagattaaatcatgttgatgctgattactagctcattgatttttgttgctgtattatatttataaatatgccaaaactgaatgagttttactatgaaaagtactgctataaatctccttggacacatcttctggagtactgctatataaccttcaaactcaaatcattcactcagtgtgtcctaagcaacccctgctctgtgccagaaattgtatgaggtcctaagtagagacgaacacagactcatccatcccatgatggagaagcaaacaataactaataaacagaatattaaaaattaccattgacactctgccttagtgcctaaaccaagcaccagaagtgtcatgtaaggaaaagaacagttctatgaggagccatagaaaacctcattaaaagagaggtgatcgacaacattgagacctacaggaatgagtgtcccagccaagggaagaacagaaggattaagttggtgcaaaagtaattgaggtttttgccattacttttaatgaaataccctaacttacttttaacggcaaaaactgcaattatttttgcatcaacctatacaaagagctaagacaagtgctttttaggcaggaggaatggaatacagagtttgccatttctatcactaagtggatgatgaaatggtgatgccccggtggagcagagggaaggaggtggacagagaggtgagccaggcaaagaccattccattctgagggcagcaggaatcttttgtaagcagggcattgggtccatgtgcaacgttctcgaaatatgagttccttcagtgtgagaatcaagtctctttatagtgttttatctcctgcacaatcttggagcccaacaaatgaatgaacaatgacactgccctctgccttatgctgggtggagatttgcacataatgagagacagccatgacctaaagtagttcacagtggagatggggcaatccaccaaacattattcgagcacacaaaggcaagcacttgtcactaaggtgagagaacctgctattacaggcaatcataaactactgggaaaaaatgtggagacgggtaggattagcttgtaaatgtttccaaaagaggtaaatctttaacagtatttgggaggaaaaaagggttacaagccagtgcagagaaagggtcagggtatttctagtaaactgaaaggaagggagaggaagaagcagattaataataaactgatgagctccaggagtggcccagaggccttggctggagggcagtgggagaaggctgtaggaaaagtgaaggtcagttggctctgaaaaaagcacctcatatacttgaaatccaatacaatctagcccttttctaactgtcatttagttgtttaattgtcattaccaatctcgtttagtttagaagttggagaagcgtcccttctgttcctctcaggtttgaggggaagagctgaggagggggtttttttcttcaggaatccaaagaaccaagagaagaaaacaccaaatgtgttaatatgcttatccacccataagtgttgtcgaaaactgggaccatgttcataatgacaaaaagcagtcttctgtcaatggaaattttgtggctgagtcatttgtcctcattttatagctcatcaggcctgagaagaacttccagacccatcaactggatcctggatgtgcagctgagcctctttcaaaactgctgtcaccatggactcctgcgcagaccaaacatcccttttgtgtgttcgtaatttacttcctattctcttttcgctcaacatactgatcagtagccagagcgtggtggctttcttttctttgtccgggtaattctgcaacacttgctgcaactactaccacctgctaattatctttgaggctctgtggattatgcaaaagtcaaggtcatctcattcttccttgcattgcctcatctggaggtgtctttcagccctgtagacttctcttccatacatagcttaagcttttcctattttcaagctttgcattgctattttttctcaatgacattatacctctctttcctcaattcttcgtgcagccagcttaaaatttattgctaacttctattgactttcaaggagcagatttttcaaccttaacatatcatttttcaaagcataattttcaaagcatcactgaactgcctagacgtatattaacagttaacaaaaggtagcaaagaagaatacttgaaacttttcaatttaccctatcttaaaagaacaggtaaatatcactttccacatcaactatctgacaaggcctagggtagactcaatcattagaactacaaccacaaatagaatccagatagcataaatctatatgctaagtattc

SEQ ID NO: 492 - DNA, 4045 bp, Homo sapiens
acttaagctaataacaaaaataagtcaaataagcttcatatgagttagagaaggtgtcagaaaaaaactaagaaccatctggaattttcactgtaattcttacctcatttctttgccctgtacagttgacgcttgaacagcgccagtttgaactgtgagggtccacctacacgtggagttttttcaattaaagttaagcactgaacgtgcctgcctctcttttctcctctaccctttctgcctctgttacccctgagacagcaacaccaactgctcctcttcttcctccccctcagattaatcaacatgaagtcaacaaggatgaagaccctttatgatgatcacttccaattagtgaatattaaatatattttgtcttttactattttcttaaaattttcttttctctagcttactttgttgtagaataagagtatatattacatagcatatcaaatatgtgttaattgactgttaacatgttaagttttgggtgtcaagggtcaactgtacacagttttcaattgtaaacctctagagggcagaagcaaagtgcctgacaaaggaaagtgtttaataaagggcagtagctagggaactacagctccccacagacaccaaggaacatattcaaatatggccaaaaggctgtaagttttctgaattccaacattaattatgccagtaacacagcactgctattggatccccacatggcatcaggtgacaacagaccaaattccaaaaagcccatttcctgcatcaggctgtccttgcatttctttctgaagtctccctggttatacactctgtagctgtgacactaatttgccacatcccacagactatcatgtcttcaatttttagtgatttactctgacactttgtcttagtgcctaagtcaagcgtaaatcttcctgaagtgtgtcacatttaggtacctttaaagaactgactacatttaaatcacagaaaattatgattaagattttctcatttcaaagggagacaaatgacagctcagtcatgtggtaaatgaaacaaacagcataatcattttctatccaactttctgactttttctttaatcccacatacaaggcacaggggatggaatagaaatgcatcatcattctcctgttctgcaaaacaatgaacactgttaagcatccaatcttgggcttcagtgacacttctccaggtgtcaagctatgtggccattctttatttttttattttattattattattattattattattagcatttcccctatcttctcttccccagaaatataggcagagctcaaggtttcacatctggcatttcattctgtgagcctgaggccctcactcactcctcttacttctattattgcttctctttggatggctccagattctcttttctcctgctgatctcctgcctcaacacttgacccatgtcccattgctctgatccctacaagagctatataattctctttcaggaacctctccccataaaggcctggccttcttgtcatgatgaaatccagtctgcaaaccgtgaaatatcctaacatccttccttcttctacctgccacaatttaccaactacccaataccccgagtcatcagttcttcctcaggcagccttaaaaatccagaccctgatctcccctcctacaactcccagccagctcagctttgatcatccttcacctgaactatttacccattctctgttctctgccctttggtctttcttagatattccctaaagcatacttccacttctggccctatctctaaactcccacaatacagaaaatgcctcatggctccccattctataacgaaaaatatccaaacatgaaatacaacacaataagaacttgaggaaaaaaaccgaaaggaatttcaggaaaaatatgacgttcaaattgacctaaattaactttaaggaaatttctggatattggacaaaatagctaagctattccattcagactctataacttaatgttccttgaacaccatctacaccttaattctcacacagataactccttcccttcttatccccaattaactgccccatgcctaaatcccaggtgccttttatagcctggctcatatgcccactaatcaaggaagcctgccttcttcttcataatgagaggactctccccctcctcggaacatacttcccttttgcttttctgctattacctatcacataaagtttcaaaatcaaaatacaaaggaaaacagaaaatacatatgtgtggtctaaaagaaaataatagaacaaatacccattagtccatcacacagctgaaaaaaacagaatgttaccactatcttggaagctccttgaatcctgcctaattacatcctcttacaattatggggtaaccattaacctttgtatttcactttcagtttttaaaagtgtatatagcattagttttgcatgggtttgaactacatataaatggaacagagtggtacacattttttttctgccatttaattttttcatttaattttatagttctaagattaaatcatgttgatgctgattactagctcattgatttttgttgctgtattatatttataaatatgccaaaactgaatgagttttactatgaaaagtactgctataaatctccttggacacatcttctggagtactgctatataaccttcaaactcaaatcattcactcagtgtgtcctaagcaacccctgctctgtgccagaaattgtatgaggtcctaagtagagacgaacacagactcatccatcccatgatggagaagcaaacaataactaataaacagaatattaaaaattaccattgacactctgccttagtgcctaaaccaagcaccagaagtgtcatgtaaggaaaagaacagttctatgaggagccatagaaaacctcattaaaagagaggtgatcgacaacattgagacctacaggaatgagtgtcccagccaagggaagaacagaaggattaagttggtgcaaaagtaattgaggtttttgccattacttttaatgaaataccctaacttacttttaacggcaaaaactgcaattatttttgcatcaacctatacaaagagctaagacaagtgctttttaggcaggaggaatggaatacagagtttgccatttctatcactaagtggatgatgaaatggtgatgccccggtggagcagagggaaggaggtggacagagaggtgagccaggcaaagaccattccattctgagggcagcaggaatcttttgtaagcagggcattgggtccatgtgcaacgttctcgaaatatgagttccttcagtgtgagaatcaagtctctttatagtgttttatctcctgcacaatcttggagcccaacaaatgaatgaacaatgacactgccctctgccttatgctgggtggagatttgcacataatgagagacagccatgacctaaagtagttcacagtggagatggggcaatccaccaaacattattcgagcacacaaaggcaagcacttgtcactaaggtgagagaacctgctattacaggcaatcataaactactgggaaaaaatgtggagacgggtaggattagcttgtaaatgtttccaaaagaggtaaatctttaacagtatttgggaggaaaaaagggttacaagccagtgcagagaaagggtcagggtatttctagtaaactgaaaggaagggagaggaagaagcagattaataataaactgatgagctccaggagtggcccagaggccttggctggagggcagtgggagaaggctgtaggaaaagtgaaggtcagttggctctgaaaaaagcacctcatatacttgaaatccaatacaatctagcccttttctaactgtcatttagttgtttaattgtcattaccaatctcgtttagtttagaagttggagaagcgtcccttctgttcctctcaggtttgaggggaagagctgaggagggggtttttttcttcaggaatccaaagaaccaagagaagaaaacacc

SEQ ID NO: 493 - DNA, 4041 bp, Homo sapiens
tccattttcattttaggtttttattgtccattttcttatatgtttttaatacacaagtacagcacacttaaaacctataactaaaagtttacataaatatatgaatgtataaaagttaacaatttgtgctattttaaaaacataaatatttgtatcacgtaactttaattttaagcagtcttcttgccaaactatatttaatcattgattttattgatatttttactacttacactaattgatattcttccattctcaactatatgtactgaaggaagtttctgtacgcatattatgacatataaagtatgcaataaataagaaaggaaatcgtgcttagggattggtgcaatgtattttcaaagtactccctcaataggatagagtttataatttatattaaatcatatctaataaacttactgaacccttagtatgtaggtatatgacattcagaattaacctatgaagtgactaatacttaatattaaaataaacatagcccttctaagcagaatttctaaattaatataatcatttctcacaattacagaaacaccagtttcacattaaccctacagacagccatgctacaaactgtgtttctactttatattttttagaagtttcctaattatcacatgaaacagacaatgtttgcttcctttcaaaagcaggaaatttttactctctggacccagtcagacaatagacttgcagaggataacagaaggctttgtgaacgggctgagacaagtacatgaatgtggctaaggataaagtgatccctacagggaaaaatggtcaaaataatatgcattaaagcatgactcccactttactgtcacaacacaagaaaggaatatcatcaggaagacaactgatgctgtcaatcacccattcatcacaccatcaccagttacaaaggcttactgtgatcctgacattgctctgtgtactgttgggaccaagagaaaagcagaagacatgattcctaccccgatgaactcacacactagctgaggaaggtaagataggaatacaactagaaaacatatgagacaatcctttatgtatggaaatcaaacatcaagtacaagatcattgtggctgcctatcattagtgatttagtctaggtagtcattagtttcacaacatgtgacagagaagataaacccaaaatcagacatagaaggtatgtcatgccatgacagtcccaagtaggagaacatagagtatcacagagaaagcctgagcaaaggcacagaggcaggggtgtgagcatcggagataagacacattcaggcccggcgcggtggctcacgcctgtaatctcagcactttgggaggctgaggcaggtggatcacgaggtcaggaaattgagaccatcctggccaacatggtgaaaccctgtctctactaaacatacaaaaattagctgggcgtggtggcgcgtgcctgtaatcccagctactcgggagactgaggcaggaaaatcgcttgaaccagggagtcagaggttgcagtgagctgacatcatgccactgcactccagcctggcgacagagtgagactctgtctcaaacaaaaacaaaaacaaacaaataagatgcattcaggtgggtcagagacttgcatcaaggttaactggttgactgaactgtacaggttacgtgggaccagacaataaaggacactgatgtaaataagctacatggatgtgagagacaagagggagacagtaaaatatattagtgagtgacatagcccagtgttgacatatttagtctcctgatagttttcataggcaactctttaaactggtttaactataaagacatttactttataaaattataccatctttggaatagtggaacaaatgacactactgcaaatgaggttaatatttttggtagaaaaaaacacatttaaaccaagtactacagactattgctttatatcatgatttaaacacttttgatttccattaaatccagaaggaagattgtgaaattaagaccttttaatctggtaagatgactgaggctgcaaattcataaatgaaatcaattttatctttataaagtactttttacatatattagttcatttgcccttcataatcaccttttgtgtggtaagcagagtggatatttttatttcaatttttcagatgaaaaattaagatgccaatgttaagtagctgccaactcacacagcaaccagaaccaaaaatttgaattcttgtcatccatgacagatgaaaataaattttttttacaaagttcagaatatcaggaggtgggtacatgttaaaattggaaaaaaactgttcacttaaaataaagtactatgtttcctagatatagaaatatagtaagaataatcaaatgattatcaaaagactgaacactagttctttaattatgactaatatgcaataggtagataaattctcctgtctcaacgggcaaggttttcaattagtaaagagaaaagggcagaattaaagatccccaaatccttctactttgagaattctgtgatctgtgtgtgcatcactcattatcaagagctggctgaagctgaaaacaccagttctggctgtatcacatgccaggaaagaaggcagtcacgggtatatgattagtgagtgaatgtcaggacggctgaatgaatagaagtgttagaacaaggtaccattcctcagattcacagatgtatgagtctgtaatgtcctaattggagggtagatagtaatttctatctgattctcaaagaaaattattggttgaaaagagttaataactattatttagattaataaataaatcatggttgttagagaaacctgggcaaccagctctggccgtctgacattactgtcataagaataactgttttttccatagattaatccccaatactctctccaagatagaaagctacactgcatgggcaccattctgatccagcatggtctttgccatctttctttttcatagaagggaggttagtcctgaaagatttttttcctttaaaatgaaaaatgagaaatttcaagatactgtctttctaaatgagaaacagtggcaaattgtagcatttcccacatattcccatttgatggaggcaagtggaactgtgccaacatttaactccctagaatatgaatcacggcatttcacacactgcttcctcccaaccaagtggcactattccctttgggctgtccagtgaaaagagcatatgtgtgcattatgcactgaactgtgtcccctaaaatttacaggttaaggtcctaactcctagtacctcagaatgggactgtatttggagatagggtctttaaagatgtaattaagttaaaatgaggtcattagagtgggtcataatctgatatgactggtgtccttagaggaagaggagatgagcacacatcagacaaggaaaaaccatgtgaagacacagggagaagacgatcatctgcagaccagaaagagtggcttccataaagactcaacccagccgacaccttcatctcacactctcagtgtctagaactgttaggaaataaatttctcttgttgaagccattcagtctatcattctttgttatggcagccccagaaaaccaaaacagtgtgtcagagccatggacaatataaggcaactgaacctcttctccagttcttccttaaaatgtagttcaagatgtatacctctaccatattctataggactgaatggagttcctaagtattctatgaatttagcaattttcctgggatgtaaaagttaagttacaggttttgtagttaaaacacctttgaccaactattttggtgaatttactatgaaaaagcatcttctgaggattcaaattattgaagagcaacttaatggtggattaaggctaatggtaatattttaccctaggagaacttaaaatgtgcattaaaatgaaatgtattaaaaaatatcagacagagatatcgcaaatcccgtattcattatggtaactgagactcatgct

SEQ ID NO: 494 - DNA, 4046 bp, Homo sapiens
tgtccatccctgtccacccacttctccattaaaagacttaaacaaacatgaacataatttataacagttcaagaccacatccctaggatgacccttaaaaaagggattattaaggcgtctgaccccttaaagcgtctgcctgaaaaacaaactccagactgccaaaagaatttactgttcactctagccaacacctgaagacaggtccctgctcactctttcttagggcatttactggaaagggtttacaatggggaatccttcctctgtccctttgagatgtggatgtatctccaacaactcaggagtgtctttctcaaggatctgaaaaccatttctttgaaatgtaatcatcaggaaggataggacccctgtctcccagtctctctctggaatggtagaatcctaactctgacaattgccagctcacagacacagctggtctgatggaactgatgctgaccaatgctttgtcatttttcacttccttgcctctgctcaagtccctcttttgtttccccagtctattcccttctgaaaacacccagtcacctctgtacaaacagaaatacatgtgcataatcagtatattattgattaaaatctgtccttaccactttaactagtgtctggttttgcttatctttgacaagagggcctgacacctgcaaaatgttcaatattaatttgttgagtgaataagttgataatagtaataaatgatgtctcacaaattttcttggggagatttctttttcctggttaaagctataatgtgatgtgggcacttcctccattataattcagcaatattttctacagatttcctctccatacacagggcacttatttatttgagataagatacctatgagtgtgagatttatatgtgtatattttataagtattacagcctttctgtcaatttatgatccaaaaaagtaactcaattccctaaaccaaagaaaatagacagcttgatgaatacatttgggcattatttggaaggaagtaaaagaatagctattaatagaacatgaggataacttcaggaaaaaatagctgtaaatcaaaggaaaaacaagaacttatgtccaatactggtggggcttagtaaaattgaaactttaacaaagtgtgataataatgtaaattgggataaacctattttgaaaaaaacgttgacatcaagtattttgaccataaaaaatacccatattcattgactgaaataacctacttatagtgctttattctattgcaatgtagtttacataatatctggaatgagctaccctcacaaagatacttgtaagagtgttatttataacatcagaaaattgaaaataaactatatgtccaaatttcagggaatggttaggtaaactgtagtaattcactcaattaaaaattttgtgactaaaaaaaattacactgtgtgacgaaatggaatgtcgagtgaaaaatatcagggaaaaagatacataaatataaatataaatagaatcttaaaaccagagatatggaaaaattagaaggtagtttattcaggagctagagttaggaactatatttttaatatctccattttctgtattttgctaatatgaatatggtatttaactatgaaagcataaatatgtctaaaagaaacatgatttttcgttacatagtatcattttcagtgtaggtcagtatcagctcttaaaagaatttgctaccaaaaaagtttaaaatcaaaacacagatatttaaaaaagttaatatttttttctgcactaattaattcaacataaatgagtttacttaaaagaaaaaaaaaatcttcaaagtgatattttttcaaaaaagattaagtctaaataaataataaaattttagatactagttaattcaatggcaatgtattaaaaacaaaacagtgggttagtactcacaggtatacaatattccaccattgggtaatgtaatttgtgaccttttgctgttcgacccgaaaagaaacaactctggcagacatcatagttaaaatgcttaaggcttctatacctagagaaaacaaaagaaaatttattggcttgcattactatcatttagtctaaatttgtggtaagaaatttcattcatccgaattaccaaaaaataaaatataaaattttggagttcaagtctctgaaacatgcttctatctgtttatacatgagagggagacaaatatgcatgtcagaagatttcttttaatgtttgaatacgaatggaaaatgataggcaagaaaagaattatatctattaagttgaaacatcaaattttaaaatatcaattataccaccaataagaaatgaattttaaaattccctcacaaagatacagttttcaacaatgagcacttttatatttggtttaaattagtcactagaaaaaaaagaaatcaagaaatactgtgtaacaaaggaaaaactaaataaagccttgatcacaatgcatccttgaatggaaatggtgttttaaaatctctggcgtaagaatgacactgcacattgacttgtacttgcagaatcttatttacaaaagcaaaaccttagacgataagtttctatgggtctgagtggaaaacatcttctccgaaatctgttctgtcagaattgctggtagaactaagaacataaattatacccacatctacagaaaaaaaattaaatgatagaaccaacagaatgaaaatggaagcaaaatttaaaagttgtgtggctgtaaactactaagtactgagtagcttctaaaatgacctgaaaaatcacttgcaaatcaatcttaaggaaatcattctgcatatactacagccagcttacttttgccaaggaggctattggtttgaaacaatcacatacactaacgacatctcttggcttatcagcatggcttgacaggtatgactgacatcttctttctaaatgaaattttgttttctgctgaatactcccttggcagatagccattctctctttttcattggtaacatacccttgtactgttagcacattttagcaatgagccttgagaaaattactgtttcttagcctctcttgctgatgttggtgaccagtgcaataaaaaccaaagttattgggtgggggttctaattggaatttcaagggactgagttagctgggaagaggcatgctgcctcttcctccccactggaaaatggatctgacatccagaagagtcactttgttagcatgaagtgactttgaagatggaagccacatgttagggatgacagtgcatgaaaacagagctaagggcccaggtggtcacagagaacagtcttggattacctaccttcactctgtttacaagaaagaaaactaaagttctaatttatttatgcaactactattaaggaattgtgtatgattctaactgaaacaattcccagcttacaaaacattatgtaaatctaagatttcattaacattttatttggaagtaattagtgaaaaactctagcagtatttataaaagttcggggaaaatgaaatatatatatatatatcttgggtagaagcttgatagaaagacagtctgaatgaagttaagattattctataatagacatattcctctatctttatttctgtacttgtctttccattcattctctgaagccacagagaaagatgcatctctttacaactaaactaatcagacctattccaactggaccccattttactattggaattgttcttatattcattcccttcatgtgtaatctttgtgcaataattaagtcaccattagcttgaagaaacctttgcttgctcactcttgtgcctaaaccaggtatcaagtctggacatatttctctctcattcgaaatacaaattttagatgtactatattctcaatgtagaaaacaggaaaaatataaatgcaagtaaaagtaagacaatatatcacttaccatcttccaattttcaatatcctgacatattttaagttatagctagatttcttaaacaagttgtttgcacatattcgc

SEQ ID NO: 495 - DNA, 4047 bp, Homo sapiens
ctctcactgtcagcaattgtatgaacttttataaatcatgtgaaatttaaagaagaactctccaacttaaagaactatctttggttcagtcattatgaaaaacaatctaaaggttctttaaaaaattaaaaatagaactatcatatcatccagtaatcccacttctgggtacatatccaaagaaaataaaatcattatctccaaaaggtatttatactcctatgtgcactgtagcattattcacaatagccaagatatggaatcaaactaagtatcctacaacagaaaaatggataaagaaaacacagtgaaatatatccagtcataaaaaaagaagggaattctgtcatttgcaataacttagatgagcctggaggacattatactaagtgaaataacccagatacagaaagacaaatactgcatgatctcacttatatgtgggacctttaaaaaaaaaagtcaagctcatagtagcacagagtagaatggtagttaccaggggctggggggtggaggaaaagagaagagactggtcaaagggtataaactttcagttatatgatgaataaattctggagacctaatgtacagcttgtggctacagataatacacttgaaattcactaacagactagatctcatctcaaaaaacaaaaccacacactatcttttatatgctctaacaacatatgaaaatgtttctaatttgaattaaattttggttacttacaacaaagatgattttaaagaagatctgagtagggtaattttcacgatgaaattaaatcatcataaataaaaaagaaatttaaatctgaacatctttaatataagatataactatttatttaaaaaatgataatccctgaattcaaaggtttaatgcatggataatacaaaaaaaaattgactactctcttgattcataagcttaatcattctaaaaaatattacagtcttgttgaatttctccacatagaggtattttttctccttcatgaaattttctctctatttccaactcctagcaaaatgcctggtatgtaaaagggtattcaacaaacataatattccagcaaggatatacacaaacccctattttccaatgtgctaactgcgtgtgtgtgtgtgtatttccctaatggagttaagtcactaaatccataccattaactttgcacaaatcacttaccttctctaagacttagttttttcttcaaaataaagataagttagatgatctcttagagctttaattccagctttaatattctataactagtatttataaagtcagatacgagctcatctggcttttatgaggcaaatttaactaacacagggagaaaagtataaaagtcatcccagtcctcaaggaggtaaaaagataattgagaagacaaaaacaccacagttagaaaatgatacaagggaacatagaatcaaatcctaattggtaaagtagaggctattggcagaggcccctgaactaagtgctttgatgagggtaaaactggaggagctgggagagatttcacacacaaagtgggagttgagctgtttttgtgagaaggtgggatttggacatatggagacagaatgatgacaggcattaaatatcatctgtgtcatgctgtctcttgaagatcaactcttattaagcctaatgaaagaattcttaaatgtacaaatttggattatagaatagtagggggaaataagacaaaaaatcatttcctagagaaataaaaattctgctacatttcttcagataatttatatatacatatataaattatcaatatcataaaatactttcatgagtcatgatagttcattcatataccattagtcttcttacagctaaaggaaaacattaccataaatcataagcagatatattggcaaaatatttagggtgctttgtggatttaaaataaggtttctaaattgcagaaagctcttaaaaatagaaacattcagagtcagctgtaaaggactttgaaaaggaaagagatgaagtcagtaaggtgactggagcatcttcttaactaaaaagggagatgcagtctgaggaatgcaaacatcaaggtccatatgggaaggtctgatccatttaacactcaagtgttgcttattatcactgtaccaaacaaattcacacttgagttcattttctaaggcagacatgaaacgactttaggaaatgttgagtaaaagatggatgaaccataaataaaacttaaaagagtagagcaaatgtaaagaatgtgggtgaacagaaagaaatttcagaaagcaatgatttctgaatacttgcatttatatttttcctgttttctacattgagaatatagtacatctaaaatttgtatttcgaatgagagagaaatatgtccagacttgatacctggtttaggcacaagagtgagcaagcaaaggtttcttcaagctaatggtgacttaattattgcacaaagattacacatgaagggaatgaatataagaacaattccaatagtaaaatggggtccagttggaataggtctgattagtttagttgtaaagagatgcatctttctctgtggcttcagagaatgaatggaaagacattaatgctacaataatagcaatcagatcattcattgctattaaatgcaagtatctttttaaagattcaatttacatatatttctagttattttacaaaaagttgtagggtcaaatgcagaaagtgacctgtcatacagatgatttataagtaggctgttgataagatcactacaaagcctcagaaatgggcaaaggatgtcttgaaaaatgaagctatccttgtataatgcaggataagctgcaatcttggaaatgataaacagtgacttttgaaagactatgcaacaagaacagttttgggtaacttacagatttcatttaaaattggtagttggagagtggaattcatatgtgtatcagtgattcttaagtatgcacctactgcatgacaactgttgaagatatgtgggtttcaaattgtttaggtattttgtaaagccattaagaattattatatgttcaagaccaagaaaaatagtaattttatatatctttactataacaacatatatttactttatgatattttgatactagcattttataatcagttttctaaacttctataatagctattcatgtaaatattactatgatattttcccccaatccaaattccttacaatgatccccagggttctatacaatctgatagttgcctttctttttaattccatctcctactattgtctctcttttgtcaaatttgtcctggtttctttctgttccctggttacacccacctctttcccagcctcagggtgagcttcaaagatattgcacttatgcagttgtacagggccctacaatcagaagggctttgaactattgcacttatgcagttgtacagggccctacaatcagaagggctttgaacttcatttactcctctgatgttgccaactcggaagtcttaataattgttaaacaaggggccccccagtttcattttgcactgggcacttccagttgtgtaaccagtgctcctttccatgcgccccttggggaacaggcttcactttctgcagcccaatcacgctaacctttttcccaactcagaccactatatgttctgtttcttctttctgaaacatgcttctactagttctttacagggctgaatctttctcaaactttggtctcaactcaaatgtcaactcagacaaaccttactgatttctttatctaaaatgtctcttctaatcattctatctcattatccattcatttccttaaaggcacttactgcaatgtataacaaccccatttattcgtttccttgttcattctcacacattcttcctcctaaagggagagtagcaggaagtccacaatcttatctttctgggtatactctgatacactatcagagctgaaattactgacaaggattctctccttgaccaaatttgagttggcctcctgtaagct

SEQ ID NO: 496 - DNA, 4047 bp, Homo sapiens
attttgacattgaaaggcaaattaaaaatgttttaaaggagtataaaatatgcatctatctgcatgattcctgtaaagcgtgtagatatttgtgatgcaaaatgccaatggtttagcaaaagattaaaaggcacatcgcttagttcaaacctatcaaattatcccgtaaattaaagcaccaagtaataattctgtgcctcagaattatccattccaaaggttaactggatgggatacaaaaaaagtacaattttgtctttatcctaaggcatcagcacagttaaacatatattagatactaagacaaataagaatctattatcacacaaccttttgaaggaaaggacaaaagcatacccacaaatcaaaaagaggaccaaaagtctactgttcctgaatgtattcgaacagctctctttcaattgaaattgctttattaaaactttttctaaattgtactatgcaaaagaatgtttagaaagacacagatcttaattgtacacagtttgatatcaagtggaaagaatatatcttaagtgtacacagtttgatatcaagcacagtaatcacacagttgaaattttttcttaccttttgtatgtgtatgtgttatacatggacctatctaaatatgcatttgcattgtatttctttctgtttacacacacacgacattacctatagagggaaaaaggtatctcctatgctttggctgtgttctttcttctatttcttagccattccacaaataaaagagataaactggtacataaatttagcaaagtttgaggtctacagggatttaaaaaaatctattttggtctgcagaccaaatactgtattcttctattttgacatgtttgagacattgactatcacaaagcactaaaatattactacttcctgattttctatcatgtacaaaataaaatgaactatgaatctgaaggctaaagtttcatttcacaaaaattgcacttgacattttttatacttcttactacaattttctctattttttataaagtagaaaacttcacacttttgagtttctcttctctagtcatctgagacggtgtctttctctgactagaacttcattatgctatacaactgggcactctgttgatgattagtaataaaagttcattttccccaagattcaaccacaagaaaatggccttagcaggaatatttatcctgacatatgaaaaagcaattcaaagatttaaaatctatctatttggatcttaacacataattgtttagtatcttaaaattacttctttgcattttttctgggtcattgaaaaacattttttttcttttcacttcaggccataaattcttattccctttgctttataatcacatggtaatttcaccatcttgaaactttcatgtatgctaaccaactcaaattatacactttgaataaattttttctattttatgtaatatataaagctatctcagtttgctgtcttcattttcaataaaaaatagattagaatcataatgtgatactttagaattttagcataaatatctgaatcaacagattaagtattattaataaatttatattaaagagatgcaaaaagagtataaaacatactctgagaaatagtaaaacaccccccataaggggaaaaaaaggaaaataaataatgaaagactatataatgccacactttaagtgtttttaaaaagaaaagagatgaccaacaaaagagatgaccagtgtgtattaaggttgacatattaatacatatttttaaaatttaaggacatgtgcaaggttaaaattgaaattttggctgtgacattgtcaaaagtgaattgtaaaaattcatgttgtgaagactgattccaagtttaatttacctcctctaaaatgcagttggtattaaacaatttctcttgtgttactaacataaaaaagacaacatcagatataaatgttcacactagatttaatattaaaatcaaacttacgtctctaagttgtcaccttcaagaactgtctggacaggcaggtaaccaagtcgagggtgtttggcaaagtacttcttcgacctgaacttgttcttaagtacctttgtgaagtctcgtacatcttccccagatgttgtctataaggttgaaaacaattacacttctctcagtaaaatggaaggcaataactatctataacaaaatcagagccgatgtaaattgatgcaattaaatgtcaacagttttggtagttttatgcatttttgaaataaagcagtctcatgaaaacacttggcaataagaactcatcactaaatatatccagtgatatgtttatactttttcattctctgttgaaaataaaccatacctagttcatttccccaatattttaaaacttgggccaaaaagtataattagttttgaaatttttccaaactaatttttccaaactattggctggttcttatcactaaaaaaattttcaatttgctattaatatagtgatgacagagtattgtggttttaaccacaatggttttaaccaagctgtgttaatggaaattagtcatagagccgatgctggctacacacaagccagcatatattctagtggggaaaaaggtaagacaataaataagagagaaagagcagggccacattggtgctctgtttgggaaggaatactgtcaatttctttgtcctttcccaactatgcagacatataattattttacctgaactacatttttaatagtggtataaaatgtcactgttcccttaggtatttctaaatgattagtttgataatcatttagggtgatatggactaacactatcccaaccccacccaccccatcatcctatcccatgaactattgttctccaagccccagttttctactgtatatcacaattctagtttctatttacaatacagatatcaactgtgatccttccgaagatgcatttaaaatatttacattacctgcacagaacttaatgaagcccatgatcctctggctccaacttggctgctcaacctaccactcattatacctcactccctcctcttagagacagaaagagagagagagagagagagaggaggaggaggaggaggaggaggaggaggaggaggcggcggaggaggagaaggggagaaggagagagaaactttcttgtaatcacagacactgaatgataagtatatttgcttacctgctgcctgctccctgtccctgcccttcagcttttccttcacaacatgcatgcccaggactcacagaaacttgttttgcagacagaaactttttttatttttttgagacagagtctcgctctgttgcccaagctggcatgcaatggcacgatctcagctcactgcaacctctgcctcccaagttcagccgattctcgtgcctcagcctcctgagtagctgggactacaggtgcgcaccaccacacccagctaatttttgtatttttagtagacggggtttcaccatgttggccaggctggtctcaaactcctgacctcaagtgattcacctgcctcagattcccaaagtgctgggattacaggtgtgagccactgcacccaaccaaaaattgaaaaaaacaaaaacaaaaaccaaactatttttgaaaacaactaagttctgagttaacccttatatagttttgccactttctatccattccccttctatcaaaacatgtctgcttctagtcaataattaagggaacttttgattctcttggcttgcaaagcagagatgagacatgattaagccgcagctacttatcatttaaaattcatcagtttttacactgacaaaacaaacaacctgcaacaaggtgccagccccatgctatcaccaggctttgccatcagattcacaatgacccatcttttcctgaataactgaatattaactacataatgatctgcagttatatggatatagggcttcccaaatgcaaagcaaaagtgcagaagaaaaaggtattcatgaaaagaaaaagaattcaaggaaaccctgtgga

SEQ ID NO: 497 - DNA, 4046 bp, Homo sapiens
cttttggcttccaggaaccacattgaaagaataagaattttcttgggccacacattaaatacactaacactaatgatagctgatgagctaaaaaagcaaaaaaaaaacaaaaaacaaaaaacaaaaaacaaatcacagacaaatcttataatgttttcagaaagtttatgaatttgtgttgggctgcattcaaagctgtcctgggccacatgtggcctgtgggttgcaggatggacaagtttataataaataatcccaagggcatagatattagtgaaatgaagtaaaatcattagggtgtgatgagttttgagaattacttttgtttttgttttaatctaatttatttaattgtaactgtatatacatgtatataaattatttttaaaaaggctctgtttaacagcttacaaacatcctgaaaatgtaacaatcagctctcacaattggctccagcataccattacatggtaggtatatattaataacaactgtctgttggatgggtgaatgagttaatatatataatgacagtatattaaaatgtatctgactgttaatcttctgacttttttcttttctttttaaaaaatgttaatcttttctgaaacagtgctaaatctgaaaatagtatttattcctattttaagatacaatatactaaatttgagcattacctttactgtgttcacagggcatgacaaaacattttaaagaagtaagattttgttctgaattattatcttttatttcctttaacgctttggctatggtcagccttgaggaaatttgttgatttaggaaagattcaagatacttaactactttacatgaaatgcacaccagtaggttaaatatgaaacaaacattatgaatacacctttattttgatttgggaattgtttcacactcatagtacatgaatgataatgtataaatctctactacattactgtcaagtattaagatgcaatctttgaaatttgaaattgaaaaacctcctgataacttttatttataaccataataaataaaacaagttttagaaaatatggaaagagaatattctatatttgagcactttaagtattttaacctagcactctccatagtttttttttttttttagtgaaaacacccaactactatgtttgacaacttttctgtctactttacagattcccatcagatccaaaccacaatagagctttgttagtcacataagcttgacagtattagtcttttagatattattcaggattaaaaatgtgaattccagggcacaaaaaaaagaataaaaagttccaaaagtaagagtacacacaatagtgggataatcagtgataaaatatttgctgagaaagttccacaaccaagtggaatatacacatatggggaaatcagaaataaactaattggctagaaagctttttagtatataatatctttttagtattctaaagtcaatgaggcttttcttagttgctaataaaataaaatattggcagaggagttaacagttttcaatgaagggtaggagtatatatctaagtatgtgtgggtcagaggtgctaaatgcagatattatggaaaaaatgttagctagtggaagaaagaggatttcacagaaagggcacatattctgtcaaattacctttgttaaattaataagaaatataagacaaatggaatgaatatatacacctgttatcctaaataaaacaatctgattttcgtggggtatataagttgacaaatgtaagatttttttcattaacttatatgaaacaaagtaaataaacatattgagtttatactatcatggtttgaaagcataaaatctacgtagaaatttttggaaccacacttaataattttgattgggatcaagattcagagccacatcagtgaagattgtttctgacagccataatacaagaactagccttcccaggcagcactaatttcatgatttacttacacacttcctgtggtggagctgctatcagtgagaaaagacccattagtcctttccatctgggccagtctgcaaaataaaaataaggaggttagacaacatggccatataggacatggtcaattggacgtacatccttaatcatttttaaattgtcaaaattctgacaaaacatagaaagatccaaatctcctaacacgactgtaaaactaaaacgtttcatgttgagctacctttctatcaccactgccttaatgcctgtaggcctttatcttacgccatgttgtaaagtctcctaactgacctaatcttctaattgagctcccagacctaggctttccttaaccctctagttggtctacatctaagtgagcgtgacattctcaaacaaataaaatgatgttcctctcataacaaaaactctccatgacttcccttcaactaaggacatgatccaactcttcagtggctgggtttttcattatcagacctcaacttctgtgtccttcactttctcatctatttctctttcccctacctgcagttcagtaaacaaaccatgccctttcccagctcaatgcttttgagtatattattccattagtccaagactttcccctagaaattctagttggcctagacccagttcaaatgttaccatttttatgatgcttgaattaacctttctaggcaaagctacttactagaatcacagacacctagtatataccacttttctgaaagtctgtgcacaccatcaagaccagcctatatattatttagagactctaaaataaacccctatcctaaagcattagcataaatttaattacatattgtaattcacatgtgcaccatctcctgagaatacctgcaatcccactttcatttactgaaacttggttacaccatctaaatcctgcttgtacagtgtttggattctcattagctggagaatcacatcctggttaggtttacttttcatagaatatatagcaggtgtttggtaaagtgcaaactgtgtcatgaaaatatgagagcccaaattccaaatataatggaatcataactcctgcaaaactgcatttcttaaatcaaggtatattaatgatattagattaattagacatagatacattctgggtggcagtgcagtggagggctctgatcaaagtttcttaccgtgtggcatattgttctattcttgaatgggtgtcatcatgaaacagttgaggagattgtgaggggctttaaaagaaaaaaacaaagcaataattttatgcccaaatattgataggtgttactattagaaatgttaggttacttaagtaatgaatctgccatgcaaacagaccactaggattgttacccggaacacagaagtattattttagaccaagagtttagtaagacccccatgctagtaccactgatcagaacacctctcctgcacgtgggctatgaatactcactcatagtgctctggccacatactgatgagtgtgataggactgcaaagaggggagagggagacaaaagtcacagaacaaacactttagagcaatttaagacaaaagcagtgggggtgtggggagattctcaattatcttccgctcatatatgtggttgccctgagagccaccatggggaaatcaaaagtaacagaagtcacagtgtattctagagaagtcgccgtgtattcaagagtctgcaggggccttttcacagatattacaggatatttgttcaaggatagcaaacacatctttaaacagtcatactggggaaaaaaccagaatgctcaaaaataactcaaaattatagaataatgtaaagataccattctataatataccaagggggatgcaatcatatttttgtttttcctagagaagaaacttggttagaaagatgaagttaaaaatgaaacactacattatatgttgatggcagaggtgcaataaaattagacttttctgttcttcatgtaattttaaatgtaaacatccaaacccagatgtacccaaaatacctcaacctcacacacacattgaacaaacatgcaacc

SEQ ID NO: 498 - DNA, 4045 bp, Homo sapiens
gttcctgggtttagaaggacgagaagaagagagtatgggtactgcaccactgcagagagcagcatttgaaagcaatccaaaagctcctcagtttcccatgtagctaaatcaaacagactggcagggagatatgggtctgtgtatgtgtatattttcctcataggaagtaaatggccaacaccctaaacctagctgtgttatccggggcagaagcaagctgtaagactaatgtctcaacaccaccaggacaccaatgagctgcagtgaattacacaatgcaaagtcagcgatgcctggaggcacctcaccaagttcatgtgaagagagaggtgataaaacatgacaaaagagcagctctaacatatggataggacaaatggacaaagcgtaaagatatagtagatagatataaaataaaacagcaaaataagagttcagtagaacatcctgtaaatatttctcatttctcaggatgaaaaagatctgagtatagaaactataaagacagagtacccaaaaataataataacaaaagaagcacattcatatgtatccctggaaaatgtctgtattttaaagataaagtatcacaagcaatctgccagaaatcaaaataaaacagtaaatcatgttcagcggtggaaaaaggtttagcttcctattttccataatattaaatgtccaaagacaatggagcaatatctacagtcctaacctatccatccatatgaccaggcaggtcattcaagtgtacaggcaaagcactttgtccacatagcatatgaaagaaagaatgagcaaggataatgcaaaatggaactaaagtagatggtaatctcaggtgttacgataaaaatagaggtaaacttattctaatattagttaaaaaaacaattagttggctgggcacggtggctcacgcctgtaatcccagcactttgggaggtcgagatgggcagatcacttgaggtcaggagcttgagaccagcctgaccaacatggtgaaaccccatctctactaaaaatacaaaaattagttgggcttggtggtgggcacctataatcccagctactcgggaggctgaggcaggagaatcacttgaacccgggaagccaaggttgcagtgagctgagattgtgccactgcactccagcctgggcgacagagtgagactctgtctcaaaaacaaaacaaaacaacaaacaaaacaaacaaacaaaaaattagttctatgatacctatcaataacatacctaaaagaaaataataaatatggaaagaaaagacttaaaataagaactaatataaggacaacaagaattaaaagaaaacttggatccctttaagctatgtggctgatcttgtggccatgatttgaccacagatcctggcgtagagttcctccaagatcacaagccaccattatgccctcagaacatttactacagcacctgacctcatggattaacttcagtgcttaatattaataccaagtaaatttttgttttaaagatttggagactgactatccatagtgaaaccagccaaaattagatttgagatgtatttttgttgtcaacatacatatagattcacttctctggggaagctgatagagtttaacacattattataattatcatccccactatcattgcattctttcattatggtatctggaagagagttaaggcagttttcacaaaaataagaatttaacaatcatttatataaaacatacaattttagtcttaagtgtttttcacagattattaggtctaaatgttgaatataaaaatagatacattctagttcttaattacatatagtaaaaaccaataacaaactctttaaatgcagatagaacatgaggtaccagatcagggacattaaacatcaatcgtatgtcttgggctaaaatagaaaatgttgcaaaaataataggtttgcaccaaggaaatatcattagatggaatataattatactacagttaagtcacacatagtaaacactatctagattacaaaattagtacatatcagatgacaaaaaaactgtgattcattcaatgaacttttgaaagtagacaagacataaataaaaataatgattttctttcttttaaggattgttctgttctaggtttcagatttgcaaactgcaatgcctgtgtaaaccacagtcagcctccccattctttctttccagtgtcacccaagggcagatggcagatggagtgagacgtcctgatagccatggcccaaggaattgtccttgcgttcccacttctgagattccccagaaccgtcatgagtcctatcctgtcctgagatgtcactgctcaatttttccttcaaagatatgtagtattcgtaacatcaatttccttttaaattgtccagagtcaatcgaacgtactcatgtatctaattgtaatagatatatgggtgatcagggacatgtcatttatctttctggatgtcagcttccttgtttataaaataggactcataataatgcccatcctagggttcataggagattatttgtttccttgcatcatctagcaccttgaggtcacctgcattcctcattttcaaagccaacacagcagcatctgcagatctctctctgacctctgcctccattgctacgtctccttctctgactctggctctccttcctaccctttatgaggacccttgggattacactggggccatctggattatccaggataatctctctatttcaaggtccttaattaaaaacctgtggcaaagtcccttttgccaagtaaagtagtatattcataggcttcagggattaggatgtggacatctttggggggccatcattctgtttaccacaaatgccttcatcatgttcttctggtaggactacttatctatttcctttctagcctataagattcatggagacagtatctgcatctatagacctattgcagtattgggtgcatggcggtcgtgagttggtaaatgtttaacaggttctccaagagaaaaagaccttgatttgtggcatttgcaacttctgtgatttaaatactttttgatcatggccaatttcaagttcatgacttcactgaatgtggaactgggaaaagatacacatttgtacaccacctgacagagataatgaatcaggagtattcaatcttttggcttccaggaaccacattgaaagaataagaattttcttgggccacacattaaatacactaacactaatgatagctgatgagctaaaaaagcaaaaaaaaaacaaaaaacaaaaaacaaaaaacaaatcacagacaaatcttataatgttttcagaaagtttatgaatttgtgttgggctgcattcaaagctgtcctgggccacatgtggcctgtgggttgcaggatggacaagtttataataaataatcccaagggcatagatattagtgaaatgaagtaaaatcattagggtgtgatgagttttgagaattacttttgtttttgttttaatctaatttatttaattgtaactgtatatacatgtatataaattatttttaaaaaggctctgtttaacagcttacaaacatcctgaaaatgtaacaatcagctctcacaattggctccagcataccattacatggtaggtatatattaataacaactgtctgttggatgggtgaatgagttaatatatataatgacagtatattaaaatgtatctgactgttaatcttctgacttttttcttttctttttaaaaaatgttaatcttttctgaaacagtgctaaatctgaaaatagtatttattcctattttaagatacaatatactaaatttgagcattacctttactgtgttcacagggcatgacaaaacattttaaagaagtaagattttgttctgaattattatcttttatttcctttaacgctttggctatggtcagccttgaggaaatttgttgatttaggaaagattcaagatacttaactactttacatgaaatgcacaccagtaggttaaatatgaaa

SEQ ID NO: 499 - DNA, 4055 bp, Homo sapiens
ctccagctgtttattgtgatcttctaaaatctgcatcctagcctccagccgacctttgtgctgcctgaggagttttgcttctgctataagttctgaatcctcagacgtgtgatggggagatataatcgactctggcggtgaaccgacagggagcccccttcggaggtgctggtccttcagctgctcatactccacctgtagatttctaatacagaaagagggagaaacagaatgactaccacgtgcattatcgtctctccaaaatcgtctgtgaggttcaaatttagctcatgctagttcctcttatataaaaatgtgtattaatagcaggatgagcatgcaggaataaaattgtagttttaagcaagtgtcccagtagacatcatcaatgaacccccaaatgctgctgtattgcagccagcatcccagtttgttaatagcctctaaaattttcactccactgagatttcttagacaatagtcttgaaaaagagaataaatgggggctacagtgaaattcatacaaaagaaaggatgacatatttccttctcccaggcctagcacacctttgttcttcctccaggtcagcaatgatcctctccagttctccacgttcttccctctctactgacttcaggatctgagctgggctctgcggctggctcactggggactctcctccgagtgtttggcaatactgctggatgagggcgtgctcgtcttccctagcaagacaaaggaaacagacccagaggctcacatctggatggtgatgtttttggacataaaggaagtagaaataatgatggacaggatagtggctgggccaagtttgtcttagagctcagtgtctccatgacctcccttttaaaactctaggaagaagttcatctagcagagcatggatattacatgagtcaacatttcaggcttctctttcatctaacagctctatctcataaacttcagaagggatatcttactcagcagaaaaaacaaaaataaggaacagcatttagtataaaagctactgtagacaaaatcaattactccatgcctaaagagttgattaaaagactactgaattaagaatcatctgacttcactgtctttagaatttcgttgaaagtaactttgaaatgctttgtaacccatatgacaaggtttataatccttatgttcttttatttaaatagctcagcacaaattataattgtagatatttataatgtctctacagatattttactttatattattagcaggtcatttttagggttgatcactctgcattagaacaagaaactacatttaatgcatgtgggttctcccacttatctaactacctgtctaatgaactagacatagcagtaacgtggttgaattagtaactgacataagtgaatgtctaacaaagttgatatatttatggcaagaaaatgctttctagcagactcggaatttcttatcttctttcaacaagagagatccagtgagatcttataaatgtgcaaataccaatctcctggctaatactagcagggcagtccattagcagatggcacgtggtccgttttgatggcttttggtaaacaagtcctggaaatcgatggctttacaggatagggcagcaggaaaacctcatgtcagttatgtagctatcagagtgtcaaatggggctatctcatgactgaagcagctccttcctgtgtaagcgatgggggctgcgaacatcccttagagacttcttctgttactctggagtcagacagcatcctgttgcagccagaaagaacctggtgtgtggtgctggcagtcctgggcctctctcagcttcaccagagccttgagattacctgtgcccttgagctgatgagtaacacttgatgctggggaagacctctggtacttgtaattctggtttgaaaattcatcttggtgttactgcagtttactctaacaaggaagggacttgaaattgtatcagacagttggtgaattcctagaaaaggtttatcctaagcattgagatcagagagctagatgaagcaattgagaaaactgaacgttctggtattatgcttgtcaaacagccaaagcaaaagttcagatgtgccacttgttgatttattttgctttcttcatcaataaaccccctctctttttctctccctctagaaatatatagatatagatatgaacatgtgtgtatgtgagtatatatatatttaaataaaggtcatatactttggttaaggccacaatataataataagtacctaacctgaccttcttgcttttatcaaataaattttaaaagaggatggggtgggacccttacaacacagttagcaactggaaataaggaacaccagtgggttaaggattgaagtaagctgcggcattatcctttgattccctttcctgagaaaacgcagcatcactgggaaatgaatgaaggaacctctgcaagaaccccatgcttgttcctgggtttagaaggacgagaagaagagagtatgggtactgcaccactgcagagagcagcatttgaaagcaatccaaaagctcctcagtttcccatgtagctaaatcaaacagactggcagggagatatgggtctgtgtatgtgtatattttcctcataggaagtaaatggccaacaccctaaacctagctgtgttatccggggcagaagcaagctgtaagactaatgtctcaacaccaccaggacaccaatgagctgcagtgaattacacaatgcaaagtcagcgatgcctggaggcacctcaccaagttcatgtgaagagagaggtgataaaacatgacaaaagagcagctctaacatatggataggacaaatggacaaagcgtaaagatatagtagatagatataaaataaaacagcaaaataagagttcagtagaacatcctgtaaatatttctcatttctcaggatgaaaaagatctgagtatagaaactataaagacagagtacccaaaaataataataacaaaagaagcacattcatatgtatccctggaaaatgtctgtattttaaagataaagtatcacaagcaatctgccagaaatcaaaataaaacagtaaatcatgttcagcggtggaaaaaggtttagcttcctattttccataatattaaatgtccaaagacaatggagcaatatctacagtcctaacctatccatccatatgaccaggcaggtcattcaagtgtacaggcaaagcactttgtccacatagcatatgaaagaaagaatgagcaaggataatgcaaaatggaactaaagtagatggtaatctcaggtgttacgataaaaatagaggtaaacttattctaatattagttaaaaaaacaattagttggctgggcacggtggctcacgcctgtaatcccagcactttgggaggtcgagatgggcagatcacttgaggtcaggagcttgagaccagcctgaccaacatggtgaaaccccatctctactaaaaatacaaaaattagttgggcttggtggtgggcacctataatcccagctactcgggaggctgaggcaggagaatcacttgaacccgggaagccaaggttgcagtgagctgagattgtgccactgcactccagcctgggcgacagagtgagactctgtctcaaaaacaaaacaaaacaacaaacaaaacaaacaaacaaaaaattagttctatgatacctatcaataacatacctaaaagaaaataataaatatggaaagaaaagacttaaaataagaactaatataaggacaacaagaattaaaagaaaacttggatccctttaagctatgtggctgatcttgtggccatgatttgaccacagatcctggcgtagagttcctccaagatcacaagccaccattatgccctcagaacatttactacagcacctgacctcatggattaacttcagtgcttaatattaataccaagtaaatttttgttttaaagatttggagactgactatccatagtgaaaccagccaaaattagatttgagatgtatt

SEQ ID NO: 500 - DNA, 4064 bp, Homo sapiens
tccaaattgtgggattgagaggccctgaagtaagccttccattgaacagcctcacccaaattctgaaacactgagagacatagagaaaagtgtatggtcaaattatgaattgcctacacaaatttctgtgtaggtaaggcagaaatgacactgttttgaattattctggtaagttaaaaagactgagagcaactgtgaaaaggcagttttctaaaatttgagagaatcactggagagaaagttgttcctgctttgagtcaataaatcatttctggagaaaggcactcctattatatcacataggagctccacacagcacaggctagagaaaaagactaaagatgacatgcatgttgatgtcagggattcttcaagagagaggagctcttggcccctgtgctgggactctacgctctctgcacctgctgcaaaggtctctccatcactacttctgagacatcactcctattcctaactactatgtgccatcaagcacttaattccctacagtgtgctgtgtcttcacatatgaaagtatcttgctgtgatctctaacaagatggcaggcaccagaaaggcagaaactgtattgatgcttcttttatatctcaaagaacagtgtttttcaaaactgaatgcaataacccaccgatgagttatagaatcaatttagtaggtcctgaccagcattaagaaagaaaaacagaaggaagaaagggagggaggaagaaagggaaaatagaaaataagagctggcatttctctataaaggcaagtattattttgtattctccatacatgcatgtattcatcttaatgtaaattgtatttcttatcatccagaaagcttgcaagcaactcccataaaacatggtccagtgttaggaaataatagtagcaaattaataaccatctttaactcaatttcttgagaatagaaaataatgattcttggagtcagcattcttgtctcactggaagaaagctttagaatgccgatttcaggtctcttgctgttccttaatacagatgcttcccatgtataatttaggaagatatatgtcataggatattttctctcaaacagttcagagctgaggcggacttcattgttaaagaagactgggaaattccattgtaagctgggcaaacacatttttgtgtgccaatgaggatttatatgcttacatgtaaaaggaaatttctaagccagtctgaattaactacggaggtaagaaattgaaagtggacttctctgcctctcctgacacctggaccatcatctcccagggcagtggacagatggcctggggaggtgtgacgctgaattctacacaccctacctgctccagcagctgtcggaggcggtggagctgagactccagctgtttattgtgatcttctaaaatctgcatcctagcctccagccgacctttgtgctgcctgaggagttttgcttctgctataagttctgaatcctcagacgtgtgatggggagatataatcgactctggcggtgaaccgacagggagcccccttcggaggtgctggtccttcagctgctcatactccacctgtagatttctaatacagaaagagggagaaacagaatgactaccacgtgcattatcgtctctccaaaatcgtctgtgaggttcaaatttagctcatgctagttcctcttatataaaaatgtgtattaatagcaggatgagcatgcaggaataaaattgtagttttaagcaagtgtcccagtagacatcatcaatgaacccccaaatgctgctgtattgcagccagcatcccagtttgttaatagcctctaaaattttcactccactgagatttcttagacaatagtcttgaaaaagagaataaatgggggctacagtgaaattcatacaaaagaaaggatgacatatttccttctcccaggcctagcacacctttgttcttcctccaggtcagcaatgatcctctccagttctccacgttcttccctctctactgacttcaggatctgagctgggctctgcggctggctcactggggactctcctccgagtgtttggcaatactgctggatgagggcgtgctcgtcttccctagcaagacaaaggaaacagacccagaggctcacatctggatggtgatgtttttggacataaaggaagtagaaataatgatggacaggatagtggctgggccaagtttgtcttagagctcagtgtctccatgacctcccttttaaaactctaggaagaagttcatctagcagagcatggatattacatgagtcaacatttcaggcttctctttcatctaacagctctatctcataaacttcagaagggatatcttactcagcagaaaaaacaaaaataaggaacagcatttagtataaaagctactgtagacaaaatcaattactccatgcctaaagagttgattaaaagactactgaattaagaatcatctgacttcactgtctttagaatttcgttgaaagtaactttgaaatgctttgtaacccatatgacaaggtttataatccttatgttcttttatttaaatagctcagcacaaattataattgtagatatttataatgtctctacagatattttactttatattattagcaggtcatttttagggttgatcactctgcattagaacaagaaactacatttaatgcatgtgggttctcccacttatctaactacctgtctaatgaactagacatagcagtaacgtggttgaattagtaactgacataagtgaatgtctaacaaagttgatatatttatggcaagaaaatgctttctagcagactcggaatttcttatcttctttcaacaagagagatccagtgagatcttataaatgtgcaaataccaatctcctggctaatactagcagggcagtccattagcagatggcacgtggtccgttttgatggcttttggtaaacaagtcctggaaatcgatggctttacaggatagggcagcaggaaaacctcatgtcagttatgtagctatcagagtgtcaaatggggctatctcatgactgaagcagctccttcctgtgtaagcgatgggggctgcgaacatcccttagagacttcttctgttactctggagtcagacagcatcctgttgcagccagaaagaacctggtgtgtggtgctggcagtcctgggcctctctcagcttcaccagagccttgagattacctgtgcccttgagctgatgagtaacacttgatgctggggaagacctctggtacttgtaattctggtttgaaaattcatcttggtgttactgcagtttactctaacaaggaagggacttgaaattgtatcagacagttggtgaattcctagaaaaggtttatcctaagcattgagatcagagagctagatgaagcaattgagaaaactgaacgttctggtattatgcttgtcaaacagccaaagcaaaagttcagatgtgccacttgttgatttattttgctttcttcatcaataaaccccctctctttttctctccctctagaaatatatagatatagatatgaacatgtgtgtatgtgagtatatatatatttaaataaaggtcatatactttggttaaggccacaatataataataagtacctaacctgaccttcttgcttttatcaaataaattttaaaagaggatggggtgggacccttacaacacagttagcaactggaaataaggaacaccagtgggttaaggattgaagtaagctgcggcattatcctttgattccctttcctgagaaaacgcagcatcactgggaaatgaatgaaggaacctctgcaagaaccccatgcttgttcctgggtttagaaggacgagaagaagagagtatgggtactgcaccactgcagagagcagcatttgaaagcaatccaaaagctcctcagtttcccatgtagctaaatcaaacagactggcagggagatatgggtctgtgtatgtgtatattttcctcataggaagtaaatggccaacaccctaaacctagctgtgtt

SEQ ID NO: 501 - DNA, 4045 bp, Homo sapiens
agactgatgtagtgtaaatgtgattctgcaaactttgagaagcattatagtagatctacaaatgaaaacctgggaaacactggcaaaacacaaatagatatattcatgtgctggtggaaaccataatataatcttcaggcaaatattcctgaaaattcacaaagaaatatatgttttatttattcatttattttgttgttgttgttgttttgagatagagtctctgttgcccaggctgaagtgcagtggcatgatctcaactcactgcaacttcagcctcccaggttcaagcgattctcatgcctcagcctcccaagtaggtaggactacaactacaggcttgtgccaccatacctggaaaatttttttggtatttttagtagagatagggttttgccatgttaatcaggctggtctcaaactcctgacctcaagtgatccacctgcctcagcctgccaaaatgctggaattacaggcatgagccaccgcacctgggccagaaatatattttaaatagctgttttcacattctgctaatgatggtattttaaaaattacaaagttctatacagtaaataataatctttaaatgaagtcaatatatcttatttacctacactcctgataattgataatctctttttcatcatttcggatggcttttttttttttttttttttttttggagaggaagtctcacgctgtctcccaggctggagtgcggtggcacgatctcggctcattgcaacctctacctcccaggttcaagcgattctcctgcctcaacctcctgagttgctgggattacaagtgcatgccaccatgcccggctactttttgtatttttagtagcgacagggtttcaccatgttggtcagactggtctcgaactcctgatctcatgatccacctgcctcgccctcccaaagtgctgggattataggtgtgagccaccgtgcccagcctgggatggcattttctaaggagatgacagacaagggtaaaataagaggctatgctttacatgaattcttattttagtgactgccctggatttaaaatcagtttgagagtaaatctctctaaaattacaaataatgtcttcaaatcctgtcaaagattatttaaaatataattatagtactaagtaatttatatgcatttatatatttgtatgtgtgtgtgtatatatatgtatacatatatacagtttacttgtatgtatatattctgctagaaacaccagaagtgttttaggtgagagctcagccaaaattgcaaggtggcaaggtgctgaagacaaaacacttggaaaaaatgaataagtaagaattattatataatttccccaggaatttggttattttctggctcttggttgttcagatggaaacttcacaggatcctaatctatgatgacttaaattgtttggcctttatacaatgactattttattccatgagaaaagaaaccagcgggaataaaaagggaaaatctgaaaacaatccctttctgcactggagtctgatgacattggagaacaatgtttgaagaaaagagagggaattacactagaaaggctgtttccatgccttgtttggcatgccactgaaagctcttctttgaactaagatgtgttccttatgatagcttgcatcgaagaggataatttcttcttaaaaccagacttattattttatttgctttcattttatcacccatcaggcatattgaaaaatctcaaagagcagaattgcgttgcgactgtacccccgttacttgatagtatctaggttgagcttcattttcttatataatgtttgccttattttcaaataatattcagtcctgtttgtaataaggtttttgttatcttaaggaagaaggcgaagggccgcatgcagaaaaagagaaagggaaggaacacgtgcagctgtggtgctgcaatctttcatactcacggcagcaagatggaaacgtgctgtgaatctgctccatgacctccgtgagatccgtgctggtgtcgtgcggtggggccagcaggtcctctcccgctgtgacagcaaataaagagaacaacaaagcttctcaaattaatgtctagccttccactaaaacccaaattcaggaggaaatactccaaccagcctctaaatatcaatgtgaaaagatttcccattgcaaaggacaattttaggggaatatacccaaaacatttttgcttgagtgttggtaatataattttacataattgacacgtactagctgtttgtttgtgtagaaagaatccacacaccaggggactgaaaaatatgagactgaaaaacaagtaatatggtcttattatttcagtgtttgaatgagaaatctattatttttgcaccacaggtatgttttcatacaaaaaaaatttcaccaatttctttttctgtcctcctttctttttggagacttcagcttaggccagcttatcctgccacaaaagtaaaggcatcttatttaagatacttttcactaggatgtgttttttatcctataatccatagtcaagatagttctcttatttaaaaaatatgaaaataatcttaatattttaatatatatattttttgagatggagcctccgtcaccaggctggagtgcattggtgcgatctcggctcactgcaacctccgcctcccaggttccagcaattctcctgcctcagcctcccgagtagctgggactacaggagtgctccaccacgcctggctaatttttgtatttttagtagagatggggtttcaccatggcctcccaaagagctgggattacaggcgggagccactgcatccagctaatattttaatttttttctggttaatgtaccaaaagatatcccaccaagaaattaatttggttacaatatatcgttctcagtaaaattctagaattttaatttaattgataacaaaatgtcattggttaacacctagtttactgagtccttcctagcatcagtgacaggtccccattgtgaccaaggacaggctgcgtgggaccgctgcctctgatgggacaggcaagacaatgtctaagtggactaggacgaagaaaagtgaataaatgagtttccacaccttggcagatacaaccataatgtttggtgtaatattattagtcctgaatatgcaccaatgtaacattttagagacagaaagtgtactaaaaaaatcattcataagcaaataatttaatttcttgctcattctaaagggcagaggaggctttttcatccaaacttcaatccacttctacagattatataaacaagtgtattatagcttatttgaaaatgtttgctttttgatattgttgaaatggatttgcacctatttaagaccaaatacaaaaaactcttttacttcctaaggcaccagtgtgtaggaatgttacttaacaggaaacacaaactaatggcaaagcacaaagcagactcagcagaggagctgtgtgctggggacaccgacctgcctggtggaactgtgggccggaggcatctggatcaagcgagtagctcagtgcagaatgctgaggagaagcccatggggaaacaccattgattcgggaatcagattcaggctggaaccacattcagaggttaaagcagagaaaggattcaaataatcataaggaaaaacatttcctttttaacttccccgccctcaccatggataattaaatcatatagaagtctttgccttcagatgttttccatacattttagcatcagcttggtgggggctttggtccttctctttccgcttggacaccttgaagaatccacttggttatgctgccagactcatttatcaacaccatttttatccctcaatttttctgttgttttaatgttaagtgaattcataagcatagttcactcatattttaaacatcagcactgggtttctaatacagtaaatttatccaatttcaaaatcagctcatactccaaggcaatattgagagagtgattagaagcatgattatggattcagattgcc

SEQ ID NO: 502 - DNA, 4037 bp, Homo sapiens
aaaacaggctacaaatcctaatgaaatttatctctctttttcccaggtgtgtcctcaaccttggcaaagtaaacctgtctcatacactttttggtttatagaaaatactaaaaggcataagggtacagctgccaacagttctcagcaaaatttttaagtaaaaaattgaaatattttcccctgcaaagtaacaaaaccacctctgtggtaccagtcattttttttttaggtcaatgttctgtgatagccaccttaagtagacatttgagagagcagtggtggtcaaatctatctagagtgactttatgtagcacataagatgccattaaaaagctgttagaacacaaaggatcaaacacatggtatttttggtatctgtggcttgggagccaccccccactcccagactgacaaactgttgtacagaatcaactaacatttaaatgtcaagtaagtttacttatttacatggagaataaagtaggaataaaatcagtcgtggataatctgcttactctaggttgggatcagtaacatagagccaaccaagccattaactcttacctgtggcctgctgggaacatttgctgaaagagaaaacaaaagaaatcacttaatggcagtcctgttactttgttggttccaactctcaggcatgcaaatgcgtggaaagtatcactctacatagggtaataatagcccagttgttaaatggatgctaataggaaaaacaagaaacacattttttttttcctggcttaatgcttcaatgagggctagttttcctggttagtttctcatatcccatgtgatttaagatttagtgcatacactaaagcattcactgagcacttagtcttgcaaaaaatctcatttcctatttaaatcatactgtgtatttggtttatgtatcagaacagagcatgttctacttactttgctgagtactaattctgaccaagggaccactgaaggcataagtctttggtttctgcctctcttgacccacccttgacacaccctggaccctaacgcccaggaaaatggtggccaagtacttgcatcaaggaaagtgctggcctaatcctcagtgtccttctggacacttgggataataatagtcccttggatgggcccagttaggaacaacggagaagttagaatatggcatctaattctcctttccacacagatagctcaattcctttttggttccagagcccataacagtgaagacgatctggcgggctttgcaagggcagccactgccatctcttctctaaggcatctgcttttcgtcccctcttttgctacatgatcatctcgttctcaatgctggggggaaaagaggagatctgtcccccagtaatggcaacaatctgttcttggtcaaataaaagttgtccctagtcatctagcatgctgcactccttccatctctcactgttctatgctgagtgggagaaaggacatcagtgaccatgtgctgtgtgctgggagctatgtgagaaaaaaagagcaggcatgaagagtacccttcctataacgtctggagggaaagtgtgaggcccggtatttgggggagaaatcaggctaaaagaagcctagttctaacagatctgtaagttacatccaggagaaaagagtggacctccacagtgtccaagggatagctgagttgaattattattaagtacaccataggtttacacactctttttaaaacagacagagttatgcttctcttgcaagtaacaaatataacaaatagccaaaccctagacagaagtctaatccattttgctctaaaccaatacttttaaccttacagccttttatcaaataaaaggctatgggtatttgcctgaacaaatcacacaaaaatattttaaaaaggaaatcactgcattgcagtgggttttgggtttttgatgaatgccattcaagcttaataaacataggcaattcatagtaaaaatatgcctgtgggtcaaaaataattttgaaagcatttcttggtctatcagcaaaaattagttggcttactgccagtatttcatacatttgaaggacataagtaaaaaatggacaaaaaaaatttataccaaaaaataaaaatagttactgcagtcagtgggaattttagtaagtacacttgttaattggcagtacatttaaacccctttccttaactccttgccaggaagtgaaggaaatgtctgcttctctgctctaagactcaacataaataattttaaaaagactttaaaaggccataattcaaggatgctatcaggaccaactgggatattaattcagacaaaggagttctaaagtgttatgtgcaacaatgtgtagacacagttaaaaaacggtcatgttaaaataggcaattcacacaattaggatttatgaatacagagtttcattttaattccaagattgccaagagtggaaattcatttggggccatgctaatttttaatccacaaaggatcaaaagtcaagattaacatgaagatcaattcattgtatgctggcgacaagcatttttaaagttctcattagttacaggggctcaagggattggcttggcattgggagggtgccaatccgatttgtttagataaattctccaaaggtggttggtaagctttgggaatcacaaaggcttattaaaatatttgctggctgagcaactttaaagggacaaaagaacaaatgaatcctacaaaacgttctgagtactatctaggaatgctacaaggaaaccttcccagctagaaaatgtaatcattcactcaagtcagaaacatgtattggggccgggtgtggtggctcacgcgtgtaatcccagcggtttgggaggccagggtgggtgggtcacttgaggccaggagtttgagaccagcctggccaacatggtgaaacccgatctctactaaaaatacaaaaattagttgggcgtggtggcatgtgcctgtagtcccagctacttgggaggctgaggcatgagaattgcttgagcctgggaggtggaggttatacagacctgagatcgtgccattgaactccagcctgggcaacagagtgagtctctgtctcagaaaaaaaaaaaaaagagagagaaagacacatgcactgggcactgagtctacctcccacgctgatttctattttgcatcaatttttaaaaggtttaataattacaggcagaatatgaaaatatgtatcaattttataaataagtcaatacagcttttatttttatggaaagctgtccctgtcttgtatataataccagagaaaaaatatgaatagcagaactttcagaagccaaaaattaaaacatggagatttcaaaggattctaaaatacacttttcatcatttcatacatggatgtgcttgaattcttgaaaagaagacatgactagtaatgctcattcagaaaactatgactattataaatatttgtgaatgtgcatagttaacactatgaaaacatgaagccagctgctccaaaccaatacttttaaaccaacagctttttatcagatagaaggctaagggtattttacatacaaacatatttaaaaggaaatcattgcatttcagtaggttttgagtttttgacgaatgtgactcaagcttaataaacattaaggaatctcagggctccataaaccactctctgaacactgagaatgacattggtgaagaggggaccaatgcaggggagaggatgaatctctgtgatgtgggtcccattgaaggtactgtgtatactcctctcagaaaccaatatcaatgaacagctaacaagatccccaaccaataggaattttatacttgcctttaaagtgaggccataaaaagagatacatacatttacctgttacaattcatttttgctctaaattatgattatttatttttaataatgttctgttttaaaatgacatgggtccagcttttgtaaaatctggatgtcagagtatactttgagaaaaatttaagagtaaattctttaggaaa

SEQ ID NO: 503 - DNA, 4035 bp, Homo sapiens
acaaccacctctacctccacagcttacttcccctacaactgcaaatttatccatcctttgacaataggatccattgatcctcccatctttatttctgtctcccacactggacatttcctcattcctttcactactgagcttaagcatctggttcaatcattataatcacttctttgcctcttcccttgaatcactgtactcactttgtcaaaccccaacttcaactttttaaatgccaatactcagcccattctggtgcctgtgctcatgaacgtgaatatgcctagagggcaacttacaaccctgcagaatggcctcatgttaaattcatgagtggcacctttaatgctgcttatagtcacactctatttcccaggccatctgctcttctattctccaagaagctatcacacatcctccagtctctcctcgcacttctgacacctcctccccaacctcactccctgctaaagtcccggcttccaattcacttagacaacagaagcaagcaggagagaacacccacagctcaccacacccctagcctacttcacatacccttgtcttttagttaagatcccagcctctcttgccaataagacaatcattcagaaggctcattgtttcaaaaagattagtaaacaagttcatgaaagaaaatgttctccaaagctgctgtggctttgtggcacattattactaaaagtatgtgataagaaaatgtgaatggaaaacaaaatctcaggatccctaactcactatgctaaagggaaaaattaaaagtgggaactgagtcacacaaaaactaccttcctaagcagctacttgcaaagatagaaggccagtgacctccctcacaaattgctcacaaggaaatttctaagggtccccaaatctttaccctaaaacagagttttgttgaatttcaccctgacaatgtgaattaacagcttatctttacaggacaaaggcaggactagaagtcatctctcctcccaccctgagaaaaatgtgtacttgactgcttcttctactctaggcataccttatcttaattatataaaacgcagatttactgagcataagacaaatgcataattgactgttcctccaccccctcctgcctgctctttcgtttctgtgaagccctcaaaatcctttttgggaaaaaacaaaaacaaaaaacaaaacaaaacaaaaaaacaaaacaaaacaggctacaaatcctaatgaaatttatctctctttttcccaggtgtgtcctcaaccttggcaaagtaaacctgtctcatacactttttggtttatagaaaatactaaaaggcataagggtacagctgccaacagttctcagcaaaatttttaagtaaaaaattgaaatattttcccctgcaaagtaacaaaaccacctctgtggtaccagtcattttttttttaggtcaatgttctgtgatagccaccttaagtagacatttgagagagcagtggtggtcaaatctatctagagtgactttatgtagcacataagatgccattaaaaagctgttagaacacaaaggatcaaacacatggtatttttggtatctgtggcttgggagccaccccccactcccagactgacaaactgttgtacagaatcaactaacatttaaatgtcaagtaagtttacttatttacatggagaataaagtaggaataaaatcagtcgtggataatctgcttactctaggttgggatcagtaacatagagccaaccaagccattaactcttacctgtggcctgctgggaacatttgctgaaagagaaaacaaaagaaatcacttaatggcagtcctgttactttgttggttccaactctcaggcatgcaaatgcgtggaaagtatcactctacatagggtaataatagcccagttgttaaatggatgctaataggaaaaacaagaaacacattttttttttcctggcttaatgcttcaatgagggctagttttcctggttagtttctcatatcccatgtgatttaagatttagtgcatacactaaagcattcactgagcacttagtcttgcaaaaaatctcatttcctatttaaatcatactgtgtatttggtttatgtatcagaacagagcatgttctacttactttgctgagtactaattctgaccaagggaccactgaaggcataagtctttggtttctgcctctcttgacccacccttgacacaccctggaccctaacgcccaggaaaatggtggccaagtacttgcatcaaggaaagtgctggcctaatcctcagtgtccttctggacacttgggataataatagtcccttggatgggcccagttaggaacaacggagaagttagaatatggcatctaattctcctttccacacagatagctcaattcctttttggttccagagcccataacagtgaagacgatctggcgggctttgcaagggcagccactgccatctcttctctaaggcatctgcttttcgtcccctcttttgctacatgatcatctcgttctcaatgctggggggaaaagaggagatctgtcccccagtaatggcaacaatctgttcttggtcaaataaaagttgtccctagtcatctagcatgctgcactccttccatctctcactgttctatgctgagtgggagaaaggacatcagtgaccatgtgctgtgtgctgggagctatgtgagaaaaaaagagcaggcatgaagagtacccttcctataacgtctggagggaaagtgtgaggcccggtatttgggggagaaatcaggctaaaagaagcctagttctaacagatctgtaagttacatccaggagaaaagagtggacctccacagtgtccaagggatagctgagttgaattattattaagtacaccataggtttacacactctttttaaaacagacagagttatgcttctcttgcaagtaacaaatataacaaatagccaaaccctagacagaagtctaatccattttgctctaaaccaatacttttaaccttacagccttttatcaaataaaaggctatgggtatttgcctgaacaaatcacacaaaaatattttaaaaaggaaatcactgcattgcagtgggttttgggtttttgatgaatgccattcaagcttaataaacataggcaattcatagtaaaaatatgcctgtgggtcaaaaataattttgaaagcatttcttggtctatcagcaaaaattagttggcttactgccagtatttcatacatttgaaggacataagtaaaaaatggacaaaaaaaatttataccaaaaaataaaaatagttactgcagtcagtgggaattttagtaagtacacttgttaattggcagtacatttaaacccctttccttaactccttgccaggaagtgaaggaaatgtctgcttctctgctctaagactcaacataaataattttaaaaagactttaaaaggccataattcaaggatgctatcaggaccaactgggatattaattcagacaaaggagttctaaagtgttatgtgcaacaatgtgtagacacagttaaaaaacggtcatgttaaaataggcaattcacacaattaggatttatgaatacagagtttcattttaattccaagattgccaagagtggaaattcatttggggccatgctaatttttaatccacaaaggatcaaaagtcaagattaacatgaagatcaattcattgtatgctggcgacaagcatttttaaagttctcattagttacaggggctcaagggattggcttggcattgggagggtgccaatccgatttgtttagataaattctccaaaggtggttggtaagctttgggaatcacaaaggcttattaaaatatttgctggctgagcaactttaaagggacaaaagaacaaatgaatcctacaaaacgttctgagtactatctaggaatgctacaaggaaaccttcccagctagaaaatgtaatcattcactcaagtcagaaacatgtattggggc

SEQ ID NO: 504 - DNA, 4042 bp, Homo sapiens
actcataggtttaagtagtagcgttagtggtggtttactgtattatcattaaattctccactaatgaatttagaaaggcctttgaaaaagctggcatactgaaacagtgaatgtgggtgggagaaaagatacacaggagcaaactacaaagattatctgtctgtctatctctatctatctatctatctatcatctatctatatctatctatcatctatctatcatctatctatctatctatctatctatctatctatctatctatatctatcatctatcatctatctctatgccttcacagtatatatagtatactgtgccttgattgtaacatatatattatatatatatgtgatatataacaacttgaaggcacagtatacatctttattctattttgtgttgctataacagaataccacagattgggtaatttacaaagaaaagaaatttatttctcagcgttctggaggttgggaagtccaatatcaaggtgccagcatctggtaaggcctgtcttgctgcgtcatcctatggtggaaggtgacagggcagagaacatgcaagagaaagtgagagaacccaacgtgctttggtaataaacccacttgagatagcaaacacacttctgtgatgacattaatccattcatgacctctgacctcatgatccaatcacttcttaaaggtccaacccctcaacactatggaatcggggattaaattttcaacacatgaactgtgggtgacacattcaaaccacagcagtatgaaagcaaaacttgttcatttgttcgcacttctattttcagctacctagtcaacaagttgctggaaatcaagtgttttttcaggaatgcttaatgtcagcattacttagtggtacacaggatgtttaaaatgtttgttcatcagaatgtatcagttttctttattttaacaaattatattttagatgatttttctagttcatagacagcttttaattttagaataaagcaacatgattctcaacattgtttcccactgaatggcttcagaaattgattaaacctactagagtggttaaaatccagtgtacggataaaaagcatacagtatttgagagcatgaaactaaaagtacatttgaaaggaacttaatgtcaacagcatctagttattaaaacactcaacaggttttatgtacacatttttacatccaatattacttttctctatcaataaaccttctatctggaaaataaattgagaatcatataattatatgtatgtgtaagagatggggagagagagagaatgagagcaacaggagactgtattagtgtgtatgagagaaactgcaggaaaaaatgtagatgtatcaggacacaggctatctctatatcttgttttcataaatgtgcattcaaaactcacattctatcagtgaatccagctgaagaatatcaaagtcatcttgtgttaaaattacttttattcaggatgaaaaatacaatatgtaaccagattagatgatagtctgtgattagttctttaccacatatttcaaaagaactacatacttacttcccattgttactgcaatatatttctttttatttattattacttagaaggttacaatgtagtgttttacgtagcttttctttaatagcagatagaggacattttgcatacaaatacaggcagaaaaaaaattaacacatgactttttaaagtaagaacaaggaagacaccaaatctacaacttggagttgagagctcagggaattgttttttctttaaataggtgctttcttgggtatgacatggcctgataaaagctctagactttgcagactgcagcagcataaagcagtttccaatgcaatggatgaagatggatctgaggtagaaaggtggtcatggctttcctttttatataaaacaattttcttcttttcaaaatatctctgctgcaaatagacacccttgccccccaacccacccaacctattctaaaataatagcaatttctaactttaagcctccttctggccagatcccagctaaagagaacccaaagttaaaatgtctttatgtttttatgtctttaggtttgaatcaaaacatattattttcacctttttttggttcctctacatttgctaattaagtaacatgtttaaactgaatcaattaaatgttaaatcagaagctaaaccaaaatacataattgaatgcactcaaaaagatgtaggtggaggtaccatcacctaagcattaatttcattcttctgtagaagcagtgacatagacttttgataaacattctttccaaatatattgatcaagtgaagggtataaaaacatctgatctttcacccgaaaggtaaaataagccgtgcactaaatgtgtgtctgctttcaacaagaaaacaactaggagtttcaagaactattaaggacttgaaaatacaaaacaacaataaaattctctttgaagggaaccaaagacaatgatgtgttctggtatcacaataggtaaaggtctgctgtgcatgtaatgatgaaaatcaagacatgggaactaggaaaggttgtactaaattttgtttctgtgtcaaaatgaaaatatgctcaagtgggcaacctttggtaatatgatctttgagattattataatgtagtcttctttatcaaatagattaagacataaaataaataattaattcctacttatataaaaagggaataaaatgcaggaaaaatatcccaaaagaaatgccatttaggcttataggatttttattacggttatccaagtggtcagcaaagaagtaagtgggcaacgtcaaataaagttaaacggcatacacagggctgtagcttaaaccatatgtgtgtatatataagatatttgattgaaatttatgaatttattaatgtggccaaatcacggaaacaaatacatggatctatttgggatctagttggttatatggctgataaacatatggctgataaattataaataaccaaaacattgtggtaaaagagtcaaagaaaaaatgaagtaattgtgcaaggttaatatgaacagcagaaggaatgtaaaaatgtaaagtggtcttctaattcttatgtaagctttgtcatagttattaaaaagacggtatcatattagaaagcccccacccactttcccaatgctgtatacattatacaaatccgtgacaaatgtattaccatttccaaatacctctctgttcattaatttacacttgcatagaaagggaagaagaaaacaataatatatggttattataaaaacaaaatatccatttctctttggatagtcagtgttttactctttcagtagaacacacagtcagcactcaacatcgtgggccaaggagccatggagcttctgatttaatggaacttggaattggcatttgctgaaaagggcaacactgtacgtcaggaaacattggttggccggatgaatacttcacattgcctatgggaagggaaaatagcactgtcagaaatttgcacaaaacattacaggaagcagagatctgtcaattcttcaagaaaataaaagtgcttctttcaagagtcttaactctactgtgacttttgcttcctgcaatgaggtccctccctctcatgctgaagttacctagtctgctttctatcactgcagctgatttagagggaagtctgaaagtcttttctcttggccaggctggaagcaaagttaaaatggagaggacttcatttctttctgctgaaggtaccaatggtgagcgaatgaggctggtgaaaatatcccatgtcttcctgggggactgtgggaggtcatctgtagagggggtaccctaacaatgccaaccatcttgatcccaagctggagtccagagaagaggaaggcaaggcaggaatcataacccaagggtgtttagtggtgccagttaaagttaaatgtcccaggtcagagacaatataaatccaggccacactcatggaagtggtatcaaccttttgaagggaagg

SEQ ID NO: 505 - DNA, 25606 bp, Homo sapiens
gttaattatccttgtattggaagagctaaaatatcaaataaaggacagtgcagaaatctagatgttagtaacatcagaaaacctcttccgccattaggcctagaagggcagaaggagaaaatgtttataccaccagagtccagaaccagagcccataaccagaggtccactggattcagtgagctagtgggtgctccttggagagagccagaactgtctaatgggggcatcaaagtatcagccataaaaaaccataaaaaagactgtctgctgtaggagatccgttcagagagagagagagaccagaaataatcttgcttatgctttccctcagccagtgtttaccattgcagaatgtacatgcgactgaaagggtgaggaaacctgggaaatgtcagttcctcaaatacagagaacactgagggaaggatgagaaataaatgtgaaagcagacatgaatggtaattgacagaaggaaactaggatgtgtccagtaaatgaataattacagtgtgcagtgattattgcaatgattaatgtattgataagataatatgaaaacacagaattcaaacagcagtgaactgagattagaattgtggagagcactggcatttaagaatgtcacacttagaatgtgtctctaggcattgttctgtgcatatatcatctcaatattcattatctgaaaattatgaattaggtacaaagctcaaataatttattttttcaggttagcaagaactttttttttttttttctgagatagagcattgctatggttgcccaggctggagtgcaatggcatgatccaggctcactgcaacatctgcctcccaggttcaagcgattctcctgcctcagcctcccaagtagctggcactacaggcatgtgccaccaccatgcctggctaattttctatttttagtagatagggggtttcaccatgttggtcaggctgatctcgaactcctaacatcaggtgatccaccctcctcggcctctgaaagtgctgggatcacaggcgtgagccaccacacccagccaagaatgtgaattttgtagaaggatataacccatatttctctgaccctagagtccttagtatacctcccataccatgtggctcatcctccttacatacatttcccatctttcaccctaccttttcctttttgtttcagcttttcactgtgtcaaaatctagaaccttatctcctacctgctctgaaaccaacagcaagttgacttccattctaacccacattggcattacactaattaaaatcgatactgagttctaaaatcatcggggattttggggactatgtcttacttcatacttccttgagatttcacattaaatgttggtgttcattaaaggtccttcatttaactttgtattcatcacactcttggattcacagttatatctaaactcttaaatacagcctgtataatcccaattcccaactctgatttctaacctctgacctccaacctcagtgccaaacccatatatcaaacaatgtactgggcttatttatatagatgtcctataggcacctcagactcagcatgggtatttcacttgttatactaaaactgtttctcttccagtgttttccattttagtcattagatagctacttgcccattcaccaaggtcacagattaaaatcatttccctacctctaatcaacagttcgattctgcttcaatttgtccctatctattaatcaccactcttactgcccagtcaggtcctcattgtttcctgaacaagagtagatgctattctttccacttttagaccttatcctggctggatgcggtggctcaggcttgtaaacccagcactttgggaggccaaggcaggcagatcacttgaggtcaggagttcaagaccagcctgaccaacatggtgaaaccccatctctactaaaaatacaaaatcagccgggcgtgtggtgcatgcctgcagtcccagctattcaggtggctgaggcaggagaattgcttgaacccaggaggcagaggttgcggtgagcctagattgcaccattgcactctagcttgggcaatagggatgaaactccatctcagaagagaaaagaaaaaaagaccttattctgttatacaaatcctctcaatgcaatccatatagaataaacatgtaaccagatctcccaatgtgtaaaatcatttcaggtagaacagaattaaagtgaaaagccaagtctttggaattaacagacaaagatcaaataacagtcctcatggccttaagaatttacctaacattttttttagaatcaattttcttatatatgaattggaaacataattcctccctcacaaacacattctaagattttaaggagatattgatgaagtacatcatctgtcatttttaacaggtagtggtagtgattcacacagcacattatgatctgttcttgtatgttctgttccattctgtattcttgacctggttgtattctttctgagctccagatccacatatctaagtacatctttttgcattttacaagagtgcatacaatacaatgtatccaagactgtatttctgattttatcgtaccactaaactcacaaatgtggccctattcttgtgttcacgactgacatcaccgtcatggtccaagtctgataatagaaatggcattgtcactttcttccctactgcaacagaagcccagctatttgtctcccattttctctacttctaaaatacatttcttcactaagtgagaataatcttttaaagacacaaatcaaaccatgccaccacctttcttgaattattcaatatctttcgttggcttccaggttacagaaaaataacttgtaacaaagtttaaaggtcattcatggctcctctctaccctattttataacatttccccttgtgatcagaatctcaggcacatcatccatctttctatatacaaataaagtcatatagtttgaactcacctctggttacttttaatcaaccaaatgctgtaaaatgcatttgtatcgctacgtgttaagcagtagttgattcttttcatttctgtgtaatattctattctttgactataccgtaatttatcaattctactgttggtaagcatttaagtggctaccggtttgaggtttttatgattattgctgtcataagcatttctatacatgtctttggatacacacatgcatgtgtttctgaatatctaaaaatgtaattgctaggtaatagacttatcaagcatccagcatttgtggatactattaaaggttttccaaaggggttatactattgtacagtgtcaccaacagagtttgagtttctattgatccatatcaccaccaaaatttgaactgtcagtcttatctcttctcttgtctcttttttcctcttttttttccttcccttcccctctcttcgtttcttttctctcctcttctcttctttcctctcttcccttccctttctctttctcttccctatcccttctcctctcctctcccctccttttttctcctctcctctccattatttatttttccttcttctcctccatcccttccatcctctctcttcccctcttccttccttcctttctccatttcttcctcctctttccttcaatccttccttttggatatgctcatgggtgtgtatttgtctgccattgtggcattatttgaattcagaaaagagtgaaaaactactgggatcttcattcctgggtctaattccacatttttttttaagaacacatctgtaaaaatgttctgtactagcatattcccaggaacttcgttaaatttaatctggctgaatatggtaaatctacttttcactttgcattctttctttagtcataccataattttaaacattcaaaatatttgtatataatatttgattttatctgtcattaaaatgttaaccttaaaattcatgtttccagaacctatttcaataactggtaaataaacactattcattttttaaatattcttttaatggatatttatttcaatataataaaaaattagagttttattataggaagaatttaccaaaagaaggaggaagcaagcaagtttaaactgcagcaatagatttgtccattccaacctctcaaaattcccttggagacaaaaatctctagaggcaaagaagaactttatattgagtcaacttgttaaaacatctgcttttagataagttttcttagtataaagtgacagaaacaaataagttaaactctaagatacattccactatattagcctaaaacacttctgcaaaaatgaaactaggaggatatttttagaaacaactgctgaaagagatgcggtggggagatatgtagaggagaacagggtttctgagtcaagacacacatgacagaacagccaatctcagggcaagttaagggaatagtggaatgaaggttcatttttcattctcacaaactaatgaaaccctgcttatcttaaaccaacctgctcactggagcagggaggacaggaccagcataaaaggcagggcagagtcgactgttgcttacactttcttctgacataacagtgttcactagcaacctcaaacagacaccatggtgcatctgactcctgaggagaagactgctgtcaatgccctgtggggcaaagtgaacgtggatgcagttggtggtgaggccctgggcaggttggtatcaaggttataagagaggctcaaggaggcaaatggaaactgggcatgtgtagacagagaagactcttgggtttctgataggcactgactctctgtcccttgggctgttttcctaccctcagattactggtggtctacccttggacccagaggttctttgagtcctttggggatctgtcctctcctgatgctgttatgggcaaccctaaggtgaaggctcatggcaagaaggtgctaggtgcctttagtgatggcctggctcacctggacaacctcaagggcactttttctcagctgagtgagctgcactgtgacaagctgcacgtggatcctgagaacttcagggtgagtccaggagatgcttcacttttctctttttactttctaatcttacattttggttcttttacctacctgctcttctcccacatttttgtcattttactatattttatcatttaatgcttctaaaattttgttaattttttatttaaatattctgcattttttccttcctcacaatcttgctattttaaattatttaatatcctgtctttctctcccaaccccctcccttcatttttccttctctaacaacaactcaaattatgcataccagctctcacctgctaattctgcacttagaataatccttttgtctctccacatgggtatgggagaggctccaactcaaagatgagaggcatagaatactgttttagaggctataaatcattttacaataaggaataattggaattttataaattctgtagtaaatggaatggaaaggaaagtgaatatttgattatgaaagactaggcagttacactggaggtggggcagaagtcgttgctaggagacagcccatcatcacactgattaatcaattaatttgtatctattaatctgtttatagtaattaatttgtatatgctatatacacatacaaaattaaaactaatttggaattaatttgtatatagtattatacagcatatatagcatatatgtacatatatagactacatgctagttaagtacatagaggatgtgtgtgtatagatatatgttatatgtatgcattcatatatgtacttatttatgctgatgggaataacctggggatcagttttgtctaagatttgggcagaaaaaaatgggtgttggctcagtttctcagaagccagtctttatttctctgttaaccatatgcatgtatctgcctacctcttctccgcagctcttgggcaatgtgctggtgtgtgtgctggcccgcaactttggcaaggaattcaccccacaaatgcaggctgcctatcagaaggtggtggctggtgtggctaatgccctggctcacaagtaccattgagatcctggactgtttcctgataaccataagaagaccctatttccctagattctattttctgaacttgggaacacaatgcctacttcaagggtatggcttctgcctaataaagaatgttcagctcaacttcctgattaatttcacttatttcatttttttgtccaggtgtgtaagaaggttcctgaggctctacagatagggagcacttgtttattttacaaagagtacatgggaaaagagaaaagcaagggaaccgtacaaggcattaatgggtgacacttctacctccaaagagcagaaattatcaagaactcttgatacaaagataatactggcactgcagaggttctagggaagacctcaaccctaagacatagcctcaagggtaatgctacgattaaactccaacaattactgagaaaataatgtgctcaattaaaggcataatgattactcaagacaatgttatgttgtctttcttcctccttcctttgcctgcacattgtagcccataatactataccccatcaagtgttcctgctccaagaaatagcttcctcctcttacttgccccagaacatctctgtaaagaatttcctcttatcttcccatatttcagtcaagattcattgctcacgtattacttgtgacctctcttgaccccagccacaataaacttctctatactacccaaaaaatctttccaaaccctcccccacaccattttttatatttttatatttttcttatttatttcatgcacacacacacactccgtgctttataagcaattctgcctattctctaccttcttacatgcctactgtgcctcatattaaattcatcaatgggcagaaagaaaatatttattcaagaaaacagtgaatgaatgaacgaatgagtaaatgagtaaatgaaggaatgattattccttgctttagaacttctggaattagaggacaatattaataataccatcgcacagtgtttctttgttgttaatgctacaacatacaaagaggaagcatgcagtaaacaaccgaacagttatttcctttctgatcataggagtaatatttttttccttgagcaccatttttgccataggtaaaattagaaggatttttagaactttctcagttgtatacatttttaaaaatctgtattatatgcatgttgattaattttaaacttacttgaatacctaaacagaatctgttgtttccttgtgtttgaaagtgctttcacagtaactctgtctgtactgccagaatatactgacaatgtgttatagttaactgttttgatcacaacattttgaattgactggcagcagaagctcttttatatccatgtgttttccttaagtcattatacatagtaggcactgagaactctttatatctgaataagatatttaggaaccactggtttacatatcagaagcagagctactcagggcattttggggaagatcactttcacattcctgagcatagggaagttctcataagagtaagatattaaaaggagatacttgtgtggtattcgaaagacagtaagagagattgtagaccttatgatcttgatagggaaaacaaactacattcctttctccaaaagtcaaaaaaaaagagcaaatatagcttactataccttctattcctacaccattagaagtagtcagtgagtctaggcaagatgttggccctaaaaatccaaataccagagaattcatgagaacatcacctggatgggacatgtgccgagcacacacaattactatatgctaggcattgctatcttcatattgaagatgaggaggtcaagagatgaaaaaagacttggcaccttgttgttatattaaaattatttgttagagtagagcttttgtaagagtctaggagtgtgggagctaaatgatgatacacatggacacaaaaaatagatcaacagacacccaggcctacttgagggttgagggtgggaagagggagacgatgaaaaagaacctattgggtattaagttcatcactgagtgatgaaataatctgtacatcaagacccagtgatatgcaatttacctatataacttgtacatgtacccccaaatttaaaatgaaagttaaaacaaagtataggaatggaattaattcctcaagatttggctttaattttatttgataatttatcaaatggttgtttttcttttctcactatggcgttgctttataaactatgttcagtatgtctgaatgaaagggtgtgtgtgtgtgtgaaagagagggagagaggaagggaagagaggacgtaataatgtgaatttgagttcatgaaaatttttcaataaaataatttaatgtcaggagaattaagcctaatagtctcctaaatcatccatctcttgagcttcagagcagtcctctgaattaatgcctacatgtttgtaaagggtgttcagactgaagccaagattctacctctaaagagatgcaatctcaaatttatctgaagactgtacctctgctctccataaattgacaccatggcccacttaatgaggttaaaaaaaagctaattctgaatgaaaatctgagcccagtggaggaaatattaatgaacaaggtgcagactgaaatataaatttttctgtaataattatgcatatactttagcaaagttctgtctatgttgactttattgctttttggtaagaaatacaactttttaaagtgaactaaactatcctatttccaaactattttgtgtgtgtgcggtttgtttctatgggttctggttttcttggagcatttttatttcattttaattaattaattctgagagctgctgagttgtgtttactgagagattgtgtatctgcgagagaagtctgtagcaagtagctagactgtgcttgacctaggaacatatacagtagattgctaaaatgtctcacttggggaattttagactaaacagtagagcatgtataaaaatactctagtcaagtgctgcttttgaaacaaatgataaaaccacactcccatagatgagtgtcatgattttcatggaggaagttaatattcatcctctaagtatacccagactagggccattctgatataaaacattaggacttaagaaagattaatagactggagtaaaggaaatggacctctgtctctctcgctgtctcttttttgaggacttgtgtgtgtgtgtgtgtgtgtgtgtgtgtgtgtgttgtggtcagtggggctggaataaaagtagaatagacctgcacctgctgtggcatccattcacagagtagaagcaagctcacaatagtgaagatgtcagtaagcttgaatagtttttcaggaactttgaatgctgatttagatttgaaactgaggctctgaccataaccaaatttgcactatttattgcttcttgaaacttatttgcctggtatgcctgggcttttgatggtcttagtatagcttgcagccttgtccctgcagggtattatgggtaatagaaagaaaagtctgcgttacactctagtcacactaagtaactaccattggaaaagcaacccctgccttgaagccaggatgatggtatctgcagcagttgccaacacaagagaaggatccatagttcatcatttaaaaaagaaaacaaaatagaaaaaggaaaactatttctgagcataagaagttgtagggtaagtctttaagaaggtgacaatttctgccaatcaggatttcaaagctcttgctttgacaattttggtctttcagaatactataaatataacctatattataatttcataaagtctgtgcattttctttgacccaggatatttgcaaaagacatattcaaacttccgcagaacactttatttcacatatacatgcctcttatatcagggatgtgaaacagggtcttgaaaactgtctaaatctaaaacaatgctaatgcaggtttaaatttaataaaataaaatccaaaatctaacagccaagtcaaatctgcatgttttaacatttaaaatattttaaagacgtcttttcccaggattcaacatgtgaaatcttttctcagggatacacgtgtgcctagatcctcattgctttagttttttacagaggaatgaatataaaaagaaaatacttaaattttatccctcttacctctataatcatacataggcataattttttaacctaggctccagatagccatagaagaaccaaacactttctgcgtgtgtgagaataatcagagtgagattttttcacaagtacctgatgagggttgagacaggtagaaaaagtgagagatctctatttatttagcaataatagagaaagcatttaagagaataaagcaatggaaataagaaatttgtaaatttccttctgataactagaaatagaggatccagtttcttttggttaacctaaattttatttcattttattgttttattttattttattttattttattttgtgtaatcgtagtttcagagtgttagagctgaaaggaagaagtaggagaaacatgcaaagtaaaagtataacactttccttactaaaccgacatgggtttccaggtaggggcaggattcaggatgactgacagggcccttagggaacactgagaccctacgctgacctcataaatgcttgctacctttgctgttttaattacatcttttaatagcaggaagcagaactctgcacttcaaaagtttttcctcacctgaggagttaatttagtacaaggggaaaaagtacagggggatgggagaaaggcgatcacgttgggaagctatagagaaagaagagtaaattttagtaaaggaggtttaaacaaacaaaatataaagagaaataggaacttgaatcaaggaaatgattttaaaacgcagtattcttagtggactagaggaaaaaaataatctgagccaagtagaagaccttttcccctcctacccctactttctaagtcacagaggctttttgttcccccagacactcttgcagattagtccaggcagaaacagttagatgtccccagttaacctcctatttgacaccactgattaccccattgatagtcacactttgggttgtaagtgactttttatttatttgtatttttgactgcattaagaggtctctagttttttatctcttgtttcccaaaacctaataagtaactaatgcacagagcacattgatttgtatttattctatttttagacataatttattagcatgcatgagcaaattaagaaaaacaacaacaaatgaatgcatatatatgtatatgtatgtgtgtatatatacacacatatatatatatattttttcttttcttaccagaaggttttaatccaaataaggagaagatatgcttagaaccgaggtagagttttcatccattctgtcctgtaagtattttgcatattctggagacgcaggaagagatccatctacatatcccaaagctgaattatggtagacaaaactcttccacttttagtgcatcaacttcttatttgtgtaataagaaaattgggaaaacgatcttcaatatgcttaccaagctgtgattccaaatattacgtaaatacacttgcaaaggaggatgtttttagtagcaatttgtactgatggtatggggccaagagatatatcttagagggagggctgagggtttgaagtccaactcctaagccagtgccagaagagccaaggacaggtacggctgtcatcacttagacctcaccctgtggagccacaccctagggttggccaatctactcccaggagcagggagggcaggagccagggctgggcataaaagtcagggcagagccatctattgcttacatttgcttctgacacaactgtgttcactagcaacctcaaacagacaccatggtgcatctgactcctgaggagaagtctgccgttactgccctgtggggcaaggtgaacgtggatgaagttggtggtgaggccctgggcaggttggtatcaaggttacaagacaggtttaaggagaccaatagaaactgggcatgtggagacagagaagactcttgggtttctgataggcactgactctctctgcctattggtctattttcccacccttaggctgctggtggtctacccttggacccagaggttctttgagtcctttggggatctgtccactcctgatgctgttatgggcaaccctaaggtgaaggctcatggcaagaaagtgctcggtgcctttagtgatggcctggctcacctggacaacctcaagggcacctttgccacactgagtgagctgcactgtgacaagctgcacgtggatcctgagaacttcagggtgagtctatgggacgcttgatgttttctttccccttcttttctatggttaagttcatgtcataggaaggggataagtaacagggtacagtttagaatgggaaacagacgaatgattgcatcagtgtggaagtctcaggatcgttttagtttcttttatttgctgttcataacaattgttttcttttgtttaattcttgctttctttttttttcttctccgcaatttttactattatacttaatgccttaacattgtgtataacaaaaggaaatatctctgagatacattaagtaacttaaaaaaaaactttacacagtctgcctagtacattactatttggaatatatgtgtgcttatttgcatattcataatctccctactttattttcttttatttttaattgatacataatcattatacatatttatgggttaaagtgtaatgttttaatatgtgtacacatattgaccaaatcagggtaattttgcatttgtaattttaaaaaatgctttcttcttttaatatacttttttgtttatcttatttctaatactttccctaatctctttctttcagggcaataatgatacaatgtatcatgcctctttgcaccattctaaagaataacagtgataatttctgggttaaggcaatagcaatatctctgcatataaatatttctgcatataaattgtaactgatgtaagaggtttcatattgctaatagcagctacaatccagctaccattctgcttttattttatggttgggataaggctggattattctgagtccaagctaggcccttttgctaatcatgttcatacctcttatcttcctcccacagctcctgggcaacgtgctggtctgtgtgctggcccatcactttggcaaagaattcaccccaccagtgcaggctgcctatcagaaagtggtggctggtgtggctaatgccctggcccacaagtatcactaagctcgctttcttgctgtccaatttctattaaaggttcctttgttccctaagtccaactactaaactgggggatattatgaagggccttgagcatctggattctgcctaataaaaaacatttattttcattgcaatgatgtatttaaattatttctgaatattttactaaaaagggaatgtgggaggtcagtgcatttaaaacataaagaaatgaagagctagttcaaaccttgggaaaatacactatatcttaaactccatgaaagaaggtgaggctgcaaacagctaatgcacattggcaacagcccctgatgcatatgccttattcatccctcagaaaaggattcaagtagaggcttgatttggaggttaaagttttgctatgctgtattttacattacttattgttttagctgtcctcatgaatgtcttttcactacccatttgcttatcctgcatctctcagccttgactccactcagttctcttgcttagagataccacctttcccctgaagtgttccttccatgttttacggcgagatggtttctcctcgcctggccactcagccttagttgtctctgttgtcttatagaggtctacttgaagaaggaaaaacaggggtcatggtttgactgtcctgtgagcccttcttccctgcctcccccactcacagtgacccggaatctgcagtgctagtctcccggaactatcactctttcacagtctgctttggaaggactgggcttagtatgaaaagttaggactgagaagaatttgaaaggcggctttttgtagcttgatattcactactgtcttattaccctgtcataggcccaccccaaatggaagtcccattcttcctcaggatgtttaagattagcattcaggaagagatcagaggtctgctggctcccttatcatgtcccttatggtgcttctggctctgcagttattagcatagtgttaccatcaaccaccttaacttcatttttcttattcaatacctaggtaggtagatgctagattctggaaataaaatatgagtctcaagtggtccttgtcctctctcccagtcaaattctgaatctagttggcaagattctgaaatcaaggcatataatcagtaataagtgatgatagaagggtatatagaagaattttattatatgagagggtgaaaccctcaaaatgaaatgaaatcagacccttgtcttacaccataaacaaaaataaatttgaatgggttaaagaattaaactaagacctaaaaccataaaaatttttaaagaaatcaaaagaagaaaattctaatattcacgttgcagccgttttttgaatttgatatgagaagcaaaggcaacaaaaggaaaaataaagaagtgaggctacatcaaactaaaaaatttccacacaaaaaacaaaacaatgaacaaatgaaaggtgaaccatgaaatggcatatttgcaaaccaaatatttcttaaatattttggttaatatccaaaatatataagaaacacagatgattcaataacaaacaaaaaattaaaaataggaaaataaaaaaattaaaaagaagaaaatcctgccatttatggcagaattgatgaacctggaggatgtaaaactaagaaaaataagcctgacacaaaaagacaaatactacacaaccttgctcatatgtgaaacataaaaaagtcactctcatggaaacagacagtagaggtatggtttccaggggttgggggtgggagaatcaggaaactattactcaaagggtataaaatttcagttatgtgggatgaataaattctagatatctaatgtacagcatcgtgactgtagttaattgtactgtaagtatatttaaaatttgcaaagagagtagatttttttttttttttagatggagttttgctcttgttgtccaggctggagtgcaatggcaagatcttggctcactgcaacctccgcctcctgggttcaagcaaatctcctgcctcagcctcccgagtagctgggattacaggcatgcgacaccatgcccagctaattttgtatttttagtagagacggggtttctccatgttggtcaggctgatccgcctgcctcggccacccaaagggctgggattacaggcgtgagccaccgggcctggccgagagtagatcttaaaagcatttaccacaagaaaaaggtaactatgtgagataatgggtatgttaattagcttgattgtggtaatcatttcacaaggtatacatatattaaaacatcatgttgtacaccttaaatatatacaatttttatttgtgaatgatacctcaataaagttgaagaataataaaaaagaatagacatcacatgaattaaaaaactaaaaaataaaaaaatgcatcttgatgattagaattgcattcttgatttttcagatacaaatatccatttgactgtttactcttttccaaaacaatacaataaattttagcactttatcttcattttccccttcccaatctataattatatatatatatattttagatattttgtatagttttactccctagattttctagtgttattattaaatagtgaagaaatgtttacacttatgtacaaaatgttttgcatgcttttcttcatttctaacattctctctaagtttattctatttttttctgattatccttaatattatctctttctgctggaaatacattgttacttttggtttatctaaaaatggcttcattttcttcattctaaaatcatgttaaattaataccactcatgtgtaagtaagatagtggaataaatagaaatccaaaaactaaatctcactaaaatataataatgtgatatataaaaatatagcttttaaatttagcttggaaataaaaaacaaacagtaattgaacaactatactttttgaaaagagtaaagtgaaatgcttaactgcatataccacaatcgattacacaattaggtgtgaaggtaaaattcagtcacgaaaaaactagaataaaaatatgggaagacatgtatataatcttagagataacactgttatttaattatcaacccaaagtagaaactatcaagggagaaataaattcagtcaacaataaaagcatttaagaagttattctaggctgggagcggtggctcacacctgcaattgcagcactttgggaggcctagacaggcggatcacgacgtcaggagttcaagatcagcctggccaacatagtgaaacctcatcgctactaaaaatataaaaacttagcctggcgtggtggcaggcatgtgtaatcccagcaatttgggaggctgaggcaggagaatcgcttgatcctgggaggcagaggttgcagtgagccaagattgtgccactgcattccagcccaggtgacagcatgagactccgtcacaaaaaaaaaagaaaaaaaaaaggggggggggagcggtggagccaagatgaccgaataggaacagctccagtctatagctcccatcgtgagtgacgcagaagacgggtgatttctgcatttccaactgaggtaccaggttcatctcacagggaagtgccaggcagtgggtgcaggacagtaggtgcagtgcactgtgcatgagccaaagcagggcgaggcatcacctcacccgggaagcacaaggggtcagggaattccctttcctagtcaaagaaaagggtgacagatggcacctggaaaatcgggtcactcccgccctaatactgcgctcttccaacaagcttaacaaatggcacaccaggagattatatcccatgcctggctcagagggtcctacgcccatggagcctcgctcattgctagcacagcagtctgaggtcaaactgcaaggtggcagtgaggctgggggaggggtgcccaccattgtccaggcttgagcaggtaaacaaagccgcctggaagctcgaactgggtggagcccaccacagctcaaggaggcctgcctgcctctgtaggctccacctctaggggcagggcacagacaaacaaaagacaacaagaacctctgcagacttaaatgtccctgtctgacagctttgaagagagtagtggttctcccagcacatagcttcagatctgagaacaggcagactgcctcctcaagtgggtccctgacccccgagtagcctaactgggaggcatcccccagtaggggcagactgacacctcacatggctggtactcctctaagacaaaacttccagaggaatgatcaggcagcagcatttgcggttcaccaatatccactgttctgcagccaccgctgttgatacccaggaaaacagcttctggagtggacctccagtaaactccaacagacctgcagctgagggtcctgactgttagaaggaaaactaacaaacagaaaggacatccacaccaaaaacccatctgtacatcgccatcatcaaagaccaaaggtagataaaaccataaagatggggaaaaagcagagcagaaaaactggacactctaaaaatgagagtgcctctcctcctccaaagtaacgcagctcctcaccagcaatggaacaaagctgggcagagaatgactttgacgagttgagagaggaaggcttcagaagatcaaactactccaagctaaaggaggaagttcgaacaaacggcaaagaagtaaaaaactttgaaaaaaaattagatgaatggataactagaataaccaatgcacagaagtccttaaaggacctgatggagctgaaaaccaaggcaggagaactacgtgacaaatacacaagcctcagtaaccgatgagatcaactggaagaaagggtatcaatgacgaaagatgaaatgaatgaaatgaagcatgaagagaagtttagagaaaaaagaataaaaagaaacgaacaaagcctccaagaaatatgggactatgtgaaaagaccaaatctacatctaattggtgtagctgaaagtgatggggagaatggaaccaagttggaaaacactctgcaggatattatccaggagaacttccccaatctagcaaggcaagcccaaattcacattcaggaaatacagagaacgccacaaagatactcctagagaaaagcaactccaagacacataactgtcagattcaccaaagttgaaatgaaggaaaaaatgttaagggcagccagagagaaaggtcgggttacccacaaagggaagcccatcagactaacagctgatctatcggcagaaactctacaagccagaagaaagtgggggccaatattcaacattgttaaagaaaagaattttcaacccagaatttcatatccagccaaactaagcttcataagtgaaggagaaataaaatcctttacagacaagcaaatgctgagagattttgtcaccaccaggcctgccctacaagagctcctgaaggaagcactaaacatggaaaggaacaactagtatcagccactgcaaaaacatgccaaattgtaaagaccatcaaggctaggaagaaactgcatcaacgagcaaaataaccagctaacatcataatgacaggatcaaattcatacataacaatactcaccttaaatgtaaataggctaaatgctccaattaaaagacacagactggcaaattggataaggagtcaagacccatctgtgttctgtattcaggaaacccatctcacgtgcagagacacacataggctcgaaataaaaggatggaggaatatctaccaagcaaatggaaaacaaaaaaaggcaggggttgcaatcctagtctctgataaaacagattttaaaccaacaaagatcaaaagagacaaagaaggccattacataatggcaaagggatctattcaagaagaagaactaactatactaaatatatatgcacccaatacaggagcacccagattcataaaacaagtcctgagtgacctacaaagagacttagatgcccacacaataataatgggagactttaacaccccactgtcaacattagacagatcaacgagacagaaagttaacaaggatatccaggaattggactcagctctgcaccaagcagacctaatagacatctacagaactctccaccccaaatcaacagaatatacattcttttcagcaccacaccacacctattccaaaactgaccacatagttggaagtaaagctctcctcagcaaatgtaaaagaacagaaactataacaaactgtctctcagaccacagtgcaatcaaactagaactcaggattaagaaactcactcaaaaccactcagctacatggaaactgaacagcctgctcctgaatgactactgggtacataacaaaatgaaggcagaaataaagatgttctttgaaaccaacgagaacaaagacacaacacaccagaatctctgagacacattcaaagcagtgtgtagagggaaatttatagcactaaatgcccacaagggaaagcaggaaagatctaaaattgacaccctaacatcacaattaaaaaactagagaagcaggagcaaacacattcaaaagctaacagaagacaagaaataactaagatcagagcagaagtgaaggacatagagacacaaaaaaacccttcaaaaaaatcaatgaatccagaagctgtttttttgaaaagatcaacaaaattgatagactgctagcaagactaataaagaagaaaagagagaagaatcaaatagacgcaataaaaaatgacacggggtatcaccactgatcccacagaaatacaaactaccgtcagagaatactataaacacctctacgcaaataaactagaaaatctagaagaaatggataaattcctcgacacatacactctgccaagactaaaccaggaagaagttgtatctctgaatagaccaataacaggctctgaaattgaggcaataattaatagcttatcaaccaaaaaaagtccgggaccagtaggattcatagccgaattctaccagaggtacaaggaggagctggtaccattccttctgaaactattccaatcaatagaaaaagagggaatcctccctaactcattttatgaggccagcatcatcctgataccaaagcctgacagagacacaacaaaaaaagagaatgttacaccaatatccttgatgaacattgatgcaaaaatcctcaataaaatactggcaaactgatccaccatgatcaagtgggcttcatccctgccatgcaaggctggttcaacatacgaaaatcaataaacataatccagcatataaacagaaccaaagacacaaaccatatgattatctcaatagatgcagaaaaggcctttgacaaaattcaacaacgcttcatgctaaaaactctcaataaattaggtattgatgggacatatctcaaaataataagagctatctatgacaaacccacagccaatatcatactgagtggacaaaaactggaagcattccctttgaaaactggcacaaggcagggatgccctctctcaccactcctattcaacatagtgttgtaagttctggccagggcaatcaggcaggagaaggaaataaagggcattcaattaggaaaagaggaagtgaaattgtccctgtttgcagatgacatgattgtatatctagaaaaccccattgtctcagcccaaaatctccttaagctgataagcaacttcagcaaagtctcaggatataaaatcagtgtgcaaaaatcacaagtattcctatgcaccaataacagacaaacagagagccaaatcatgagtgaactcccattcacaattgcttcaaagagaataaaatacctaggaatccaacttacaagggatgtgaaggacctcttcaaggagaactacaaaccactgctcaatgaaataaaagaggatacaaacaaatggaagaacattccatgctcatgggtaggaagaatcaatatcgtgaaaatggtcatactgcccaaggtaatttatagattcaatgccatccccatcaagctaccaatgactttcttcacagaactggaaaaaactactttaaagttcatatggaaccaaaaaagagcccacatcaccaaggcaatcctaagccaaaagaacaaagctggaggcatcacgctacctgacttcaaactatactacaatgctacggtaaccaaaacagcatggtactggtaccaaaacagagatctagaccaatggaacagaacagagccctcagaaataatgccgcatatctacaactatctgatctttgacaaacctgagagaaacaagcaatggggaaaggattccctatttaataaatggtgctgggaaaactggctagccatatgtagaaagctgaaactggatcccttccttacaccttatacaaaaattaattcaagatggattaaagacttacatgttagacctaaaaccataaaaaccctagaaaaaaacctaggcaataccattcaggacataggcatgggcaaggacttcatgtctaaaacaccaaaagcaatggcaacaaaagacaaaatggacaaacgggatctaattaaactaaagagcttctgcacagctaaagaaactaccatcagagtgaacaggcaacctacaaaatgggagaaaatttttgcaatctactcatctgacaaagggctaatatccagaatctacaatgaactcaaacaaatttacaagaaaaaacaaacaaccccatcaaaaagtgggcaaaggatatgaacagacacttcgcaaaagaagacatttatgtaatcaaaaaacacatgaaaaaatgctcatcatcactagccatcagagaaatgcaaatcaaaaccacaatgagataccatctcacaccagttagaatggcgatcattaaaaagtcaggaaacaacaggtgctggagaggatgtggagaaacaggaacaacttttacactgttggtgggactgtaaactagttcaaccattgcggaagtcagtgtggcaattcctcaggaatctagaactagaaataccatttgacccagccatcccattactgggtacatacccaaaggattataaatcatgctgctataaagacacatgcacacgtatgtttattgcagcactattcacaatagcaaagacttggaaccaacccaaatgtccaacaacgatagactggattaagaaaatgtggcacatatacaccatggaatactatgcagccataaaaaatgatgagttcatgtcctttgtagggacatggatgaagctggaaactatcattctcagcaaactatcacaaggagaataaaccaaacaccgcatgttctcactcataggtgggaattgaacaatgagaacacatggacacatgaagaggaacatcacactctggggactgttatggggtggggggcaggggcagggatagcactaggagatatacctaatgctaaatgacgagttaatgggtgcagcacaccaacatggcacatgtatacatatataacaaacctgcatgttgtgcacatgtaccctaaaacttgaagtataataataaaaaaaagttatcctattaaaactgatctcacacatccgtagagccattatcaagtctttctctttgaaatagacagaaatttagtgttttctcagtcagttaacattccttcaactagattagttgtgacaaaatttcaggccttgctcaactctaacctcagtctctccatatatttctgagagtcttccttcttatttgtttataagaatttagtaaatggcaatattgagaagtagaaaattttggagacttgtttttcatgaaccagaacaatctcaaagcagcaatactaaacaggagccaagcctagaataaagttgaatttctggaatcaacaagctaggggaaagtctcccattaagtcaaatatttgacaactgggaggtcaagtcagaggtgaaaaatgattaaagataacaagaggtctgaaaacaaagtgaccaattaaaataaaaagaaagagccaagctgggcacagtggcttgcatctgtagtcccagtaacccaggaggctgaagtgataggatcacttgagcccaggatttcagggttgcagtgagcaataatgacaccactgctctctagccttggtgactgagatcctgtctctgaggaaaaacaaacaaacaagcaaaaaacaaacaaacaaacacacagatattaagaacatagaagttttgttacggtgatgatattctccaacacaggtctgaaccccttgcagtgcctcggggctgtttctccagtggattcttgggttcttcacatcttctcaactttgtgaaaagatattcatccaaaggtctcacctgtcttattcagagcttggattttggactagctttttctatttcttgggattctctagagccatatattcagatataacacagatataaccaaaagaagcaaaggaggcatcacagaaggggctttgtattctggggagggggacatagagttgagagaaatacaggaatttataggactctactcaaagagccctcaaataaagtacggctagtcttctttgcctaagacaatgagcagtccaggaagttatccatttcttttagattttctagtttatgtacatagagatgttcatagtagtttttgatgattatttgtatttctgtggggtgagtgataatattccctttttcatttctaactgtgcttatttggatcttctctcttgtcttctttattagtctagctagtgatctaccttattaattttttcacaaaaccagctcttggactcattaatcttttgaatggtattttgtgttttaatatccttcagttagctttgatcttgtttatttcttgtcttctgctagatttagggttggtttgctcttggttctctggttcttttagttgtgacattaggttgttaatttgagggctttaagactttttgatgtgggcatttagtgtataaatttctctcttaacactgtctaagctgtgtcccagagattccggtatattgtatctttgttctcattagtttcaaagaactattttatttttgccttagttttcattatttacccaaaattcattcaggagcaggttgtttaatttccatgtaattgcatagttttcagctattcattagtcttgaaatctatttttattcctctgtggtctgagagtgattgatatgattttttttttgcatttgctgaggattgttttaggtcctcccaaggctgaaccaggaagaaatcaatttcctgaagagatccatgatgagctctgaaaatgattcagtaataaatagcctatcaaacaaaaaaagccctggacaatatgattcacaaccaaattctatcagatgcacaaagaagagttggaaaaattcctactgaagctactccaaaaaattgagggggagggattcaacctcagctcattttatgaggccagcatcatcctgataccaaaacctgatagacacacaacaacaaaaaaagaaaacttcaggccaatatccttgaacattgatgcaaaaatactagcaagccaaatccagcaacacatcacaaagctaatccacctcaatcaagtaggctttatccctgagaagcaagattggttcagcatatacaaattgataaatgtgattcatcatatatacagcactaaaaacagaaaccacatgatcatttcaatatgtgcaaaaaaagattttgataaaattcaacttcacttcatgttaaaacctctcaacaaactagctatttaaggacatgacctcaaaataatatgagccatctatgacaaacccacagccaacatcatacagaatgggcaaaacctggaagcattcttcttgaaaactggcacaagacaaggatgccctctctcaccactgctattcagtatagtactggcagtcctggccagagcaatcaggcaagagaagggaataaagggcatccaaataggaagagagaaagtcaaagtatccctgttttctgtatctagaaaacaccatagtcaaggcccaaaagctccttcagctgataac

SEQ ID NO: 506 - DNA, 25606 bp, Homo sapiens
gttatcagctgaaggagcttttgggccttgactatggtgttttctagatacagaaaacagggatactttgactttctctcttcctatttggatgccctttattcccttctcttgcctgattgctctggccaggactgccagtactatactgaatagcagtggtgagagagggcatccttgtcttgtgccagttttcaagaagaatgcttccaggttttgcccattctgtatgatgttggctgtgggtttgtcatagatggctcatattattttgaggtcatgtccttaaatagctagtttgttgagaggttttaacatgaagtgaagttgaattttatcaaaatctttttttgcacatattgaaatgatcatgtggtttctgtttttagtgctgtatatatgatgaatcacatttatcaatttgtatatgctgaaccaatcttgcttctcagggataaagcctacttgattgaggtggattagctttgtgatgtgttgctggatttggcttgctagtatttttgcatcaatgttcaaggatattggcctgaagttttctttttttgttgttgtgtgtctatcaggttttggtatcaggatgatgctggcctcataaaatgagctgaggttgaatccctccccctcaattttttggagtagcttcagtaggaatttttccaactcttctttgtgcatctgatagaatttggttgtgaatcatattgtccagggctttttttgtttgataggctatttattactgaatcattttcagagctcatcatggatctcttcaggaaattgatttcttcctggttcagccttgggaggacctaaaacaatcctcagcaaatgcaaaaaaaaaatcatatcaatcactctcagaccacagaggaataaaaatagatttcaagactaatgaatagctgaaaactatgcaattacatggaaattaaacaacctgctcctgaatgaattttgggtaaataatgaaaactaaggcaaaaataaaatagttctttgaaactaatgagaacaaagatacaatataccggaatctctgggacacagcttagacagtgttaagagagaaatttatacactaaatgcccacatcaaaaagtcttaaagccctcaaattaacaacctaatgtcacaactaaaagaaccagagaaccaagagcaaaccaaccctaaatctagcagaagacaagaaataaacaagatcaaagctaactgaaggatattaaaacacaaaataccattcaaaagattaatgagtccaagagctggttttgtgaaaaaattaataaggtagatcactagctagactaataaagaagacaagagagaagatccaaataagcacagttagaaatgaaaaagggaatattatcactcaccccacagaaatacaaataatcatcaaaaactactatgaacatctctatgtacataaactagaaaatctaaaagaaatggataacttcctggactgctcattgtcttaggcaaagaagactagccgtactttatttgagggctctttgagtagagtcctataaattcctgtatttctctcaactctatgtccccctccccagaatacaaagccccttctgtgatgcctcctttgcttcttttggttatatctgtgttatatctgaatatatggctctagagaatcccaagaaatagaaaaagctagtccaaaatccaagctctgaataagacaggtgagacctttggatgaatatcttttcacaaagttgagaagatgtgaagaacccaagaatccactggagaaacagccccgaggcactgcaaggggttcagacctgtgttggagaatatcatcaccgtaacaaaacttctatgttcttaatatctgtgtgtttgtttgtttgttttttgcttgtttgtttgtttttcctcagagacaggatctcagtcaccaaggctagagagcagtggtgtcattattgctcactgcaaccctgaaatcctgggctcaagtgatcctatcacttcagcctcctgggttactgggactacagatgcaagccactgtgcccagcttggctctttctttttattttaattggtcactttgttttcagacctcttgttatctttaatcatttttcacctctgacttgacctcccagttgtcaaatatttgacttaatgggagactttcccctagcttgttgattccagaaattcaactttattctaggcttggctcctgtttagtattgctgctttgagattgttctggttcatgaaaaacaagtctccaaaattttctacttctcaatattgccatttactaaattcttataaacaaataagaaggaagactctcagaaatatatggagagactgaggttagagttgagcaaggcctgaaattttgtcacaactaatctagttgaaggaatgttaactgactgagaaaacactaaatttctgtctatttcaaagagaaagacttgataatggctctacggatgtgtgagatcagttttaataggataacttttttttattattatacttcaagttttagggtacatgtgcacaacatgcaggtttgttatatatgtatacatgtgccatgttggtgtgctgcacccattaactcgtcatttagcattaggtatatctcctagtgctatccctgcccctgccccccaccccataacagtccccagagtgtgatgttcctcttcatgtgtccatgtgttctcattgttcaattcccacctatgagtgagaacatgcggtgtttggtttattctccttgtgatagtttgctgagaatgatagtttccagcttcatccatgtccctacaaaggacatgaactcatcattttttatggctgcatagtattccatggtgtatatgtgccacattttcttaatccagtctatcgttgttggacatttgggttggttccaagtctttgctattgtgaatagtgctgcaataaacatacgtgtgcatgtgtctttatagcagcatgatttataatcctttgggtatgtacccagtaatgggatggctgggtcaaatggtatttctagttctagattcctgaggaattgccacactgacttccgcaatggttgaactagtttacagtcccaccaacagtgtaaaagttgttcctgtttctccacatcctctccagcacctgttgtttcctgactttttaatgatcgccattctaactggtgtgagatggtatctcattgtggttttgatttgcatttctctgatggctagtgatgatgagcattttttcatgtgttttttgattacataaatgtcttcttttgcgaagtgtctgttcatatcctttgcccactttttgatggggttgtttgttttttcttgtaaatttgtttgagttcattgtagattctggatattagccctttgtcagatgagtagattgcaaaaattttctcccattttgtaggttgcctgttcactctgatggtagtttctttagctgtgcagaagctctttagtttaattagatcccgtttgtccattttgtcttttgttgccattgcttttggtgttttagacatgaagtccttgcccatgcctatgtcctgaatggtattgcctaggtttttttctagggtttttatggttttaggtctaacatgtaagtctttaatccatcttgaattaatttttgtataaggtgtaaggaagggatccagtttcagctttctacatatggctagccagttttcccagcaccatttattaaatagggaatcctttccccattgcttgtttctctcaggtttgtcaaagatcagatagttgtagatatgcggcattatttctgagggctctgttctgttccattggtctagatctctgttttggtaccagtaccatgctgttttggttaccgtagcattgtagtatagtttgaagtcaggtagcgtgatgcctccagctttgttcttttggcttaggattgccttggtgatgtgggctcttttttggttccatatgaactttaaagtagttttttccagttctgtgaagaaagtcattggtagcttgatggggatggcattgaatctataaattaccttgggcagtatgaccattttcacgatattgattcttcctacccatgagcatggaatgttcttccatttgtttgtatcctcttttatttcattgagcagtggtttgtagttctccttgaagaggtccttcacatcccttgtaagttggattcctaggtattttattctctttgaagcaattgtgaatgggagttcactcatgatttggctctctgtttgtctgttattggtgcataggaatacttgtgatttttgcacactgattttatatcctgagactttgctgaagttgcttatcagcttaaggagattttgggctgagacaatggggttttctagatatacaatcatgtcatctgcaaacagggacaatttcacttcctcttttcctaattgaatgccctttatttccttctcctgcctgattgccctggccagaacttacaacactatgttgaataggagtggtgagagagggcatccctgccttgtgccagttttcaaagggaatgcttccagtttttgtccactcagtatgatattggctgtgggtttgtcatagatagctcttattattttgagatatgtcccatcaatacctaatttattgagagtttttagcatgaagcgttgttgaattttgtcaaaggccttttctgcatctattgagataatcatatggtttgtgtctttggttctgtttatatgctggattatgtttattgattttcgtatgttgaaccagccttgcatggcagggatgaagcccacttgatcatggtggatcagtttgccagtattttattgaggatttttgcatcaatgttcatcaaggatattggtgtaacattctctttttttgttgtgtctctgtcaggctttggtatcaggatgatgctggcctcataaaatgagttagggaggattccctctttttctattgattggaatagtttcagaaggaatggtaccagctcctccttgtacctctggtagaattcggctatgaatcctactggtcccggactttttttggttgataagctattaattattgcctcaatttcagagcctgttattggtctattcagagatacaacttcttcctggtttagtcttggcagagtgtatgtgtcgaggaatttatccatttcttctagattttctagtttatttgcgtagaggtgtttatagtattctctgacggtagtttgtatttctgtgggatcagtggtgataccccgtgtcattttttattgcgtctatttgattcttctctcttttcttctttattagtcttgctagcagtctatcaattttgttgatcttttcaaaaaaacagcttctggattcattgatttttttgaagggtttttttgtgtctctatgtccttcacttctgctctgatcttagttatttcttgtcttctgttagcttttgaatgtgtttgctcctgcttctctagttttttaattgtgatgttagggtgtcaattttagatctttcctgctttcccttgtgggcatttagtgctataaatttccctctacacactgctttgaatgtgtctcagagattctggtgtgttgtgtctttgttctcgttggtttcaaagaacatctttatttctgccttcattttgttatgtacccagtagtcattcaggagcaggctgttcagtttccatgtagctgagtggttttgagtgagtttcttaatcctgagttctagtttgattgcactgtggtctgagagacagtttgttatagtttctgttcttttacatttgctgaggagagctttacttccaactatgtggtcagttttggaataggtgtggtgtggtgctgaaaagaatgtatattctgttgatttggggtggagagttctgtagatgtctattaggtctgcttggtgcagagctgagtccaattcctggatatccttgttaactttctgtctcgttgatctgtctaatgttgacagtggggtgttaaagtctcccattattattgtgtgggcatctaagtctctttgtaggtcactcaggacttgttttatgaatctgggtgctcctgtattgggtgcatatatatttagtatagttagttcttcttcttgaatagatccctttgccattatgtaatggccttctttgtctcttttgatctttgttggtttaaaatctgttttatcagagactaggattgcaacccctgcctttttttgttttccatttgcttggtagatattcctccatccttttatttcgagcctatgtgtgtctctgcacgtgagatgggtttcctgaatacagaacacagatgggtcttgactccttatccaatttgccagtctgtgtcttttaattggagcatttagcctatttacatttaaggtgagtattgttatgtatgaatttgatcctgtcattatgatgttagctggttattttgctcgttgatgcagtttcttcctagccttgatggtctttacaatttggcatgtttttgcagtggctgatactagttgttcctttccatgtttagtgcttccttcaggagctcttgtagggcaggcctggtggtgacaaaatctctcagcatttgcttgtctgtaaaggattttatttctccttcacttatgaagcttagtttggctggatatgaaattctgggttgaaaattcttttctttaacaatgttgaatattggcccccactttcttctggcttgtagagtttctgccgatagatcagctgttagtctgatgggcttccctttgtgggtaacccgacctttctctctggctgcccttaacattttttccttcatttcaactttggtgaatctgacagttatgtgtcttggagttgcttttctctaggagtatctttgtggcgttctctgtatttcctgaatgtgaatttgggcttgccttgctagattggggaagttctcctggataatatcctgcagagtgttttccaacttggttccattctccccatcactttcagctacaccaattagatgtagatttggtcttttcacatagtcccatatttcttggaggctttgttcgtttctttttattcttttttctctaaacttctcttcatgcttcatttcattcatttcatctttcgtcattgataccctttcttccagttgatctcatcggttactgaggcttgtgtatttgtcacgtagttctcctgccttggttttcagctccatcaggtcctttaaggacttctgtgcattggttattctagttatccattcatctaattttttttcaaagttttttacttctttgccgtttgttcgaacttcctcctttagcttggagtagtttgatcttctgaagccttcctctctcaactcgtcaaagtcattctctgcccagctttgttccattgctggtgaggagctgcgttactttggaggaggagaggcactctcatttttagagtgtccagtttttctgctctgctttttccccatctttatggttttatctacctttggtctttgatgatggcgatgtacagatgggtttttggtgtggatgtcctttctgtttgttagttttccttctaacagtcaggaccctcagctgcaggtctgttggagtttactggaggtccactccagaagctgttttcctgggtatcaacagcggtggctgcagaacagtggatattggtgaaccgcaaatgctgctgcctgatcattcctctggaagttttgtcttagaggagtaccagccatgtgaggtgtcagtctgcccctactgggggatgcctcccagttaggctactcgggggtcagggacccacttgaggaggcagtctgcctgttctcagatctgaagctatgtgctgggagaaccactactctcttcaaagctgtcagacagggacatttaagtctgcagaggttcttgttgtcttttgtttgtctgtgccctgcccctagaggtggagcctacagaggcaggcaggcctccttgagctgtggtgggctccacccagttcgagcttccaggcggctttgtttacctgctcaagcctggacaatggtgggcacccctcccccagcctcactgccaccttgcagtttgacctcagactgctgtgctagcaatgagcgaggctccatgggcgtaggaccctctgagccaggcatgggatataatctcctggtgtgccatttgttaagcttgttggaagagcgcagtattagggcgggagtgacccgattttccaggtgccatctgtcacccttttctttgactaggaaagggaattccctgaccccttgtgcttcccgggtgaggtgatgcctcgccctgctttggctcatgcacagtgcactgcacctactgtcctgcacccactgcctggcacttccctgtgagatgaacctggtacctcagttggaaatgcagaaatcacccgtcttctgcgtcactcacgatgggagctatagactggagctgttcctattcggtcatcttggctccaccgctccccccccccttttttttttcttttttttttgtgacggagtctcatgctgtcacctgggctggaatgcagtggcacaatcttggctcactgcaacctctgcctcccaggatcaagcgattctcctgcctcagcctcccaaattgctgggattacacatgcctgccaccacgccaggctaagtttttatatttttagtagcgatgaggtttcactatgttggccaggctgatcttgaactcctgacgtcgtgatccgcctgtctaggcctcccaaagtgctgcaattgcaggtgtgagccaccgctcccagcctagaataacttcttaaatgcttttattgttgactgaatttatttctcccttgatagtttctactttgggttgataattaaataacagtgttatctctaagattatatacatgtcttcccatatttttattctagttttttcgtgactgaattttaccttcacacctaattgtgtaatcgattgtggtatatgcagttaagcatttcactttactcttttcaaaaagtatagttgttcaattactgtttgttttttatttccaagctaaatttaaaagctatatttttatatatcacattattatattttagtgagatttagtttttggatttctatttattccactatcttacttacacatgagtggtattaatttaacatgattttagaatgaagaaaatgaagccatttttagataaaccaaaagtaacaatgtatttccagcagaaagagataatattaaggataatcagaaaaaaatagaataaacttagagagaatgttagaaatgaagaaaagcatgcaaaacattttgtacataagtgtaaacatttcttcactatttaataataacactagaaaatctagggagtaaaactatacaaaatatctaaaatatatatatatataattatagattgggaaggggaaaatgaagataaagtgctaaaatttattgtattgttttggaaaagagtaaacagtcaaatggatatttgtatctgaaaaatcaagaatgcaattctaatcatcaagatgcatttttttattttttagttttttaattcatgtgatgtctattcttttttattattcttcaactttattgaggtatcattcacaaataaaaattgtatatatttaaggtgtacaacatgatgttttaatatatgtataccttgtgaaatgattaccacaatcaagctaattaacatacccattatctcacatagttacctttttcttgtggtaaatgcttttaagatctactctcggccaggcccggtggctcacgcctgtaatcccagccctttgggtggccgaggcaggcggatcagcctgaccaacatggagaaaccccgtctctactaaaaatacaaaattagctgggcatggtgtcgcatgcctgtaatcccagctactcgggaggctgaggcaggagatttgcttgaacccaggaggcggaggttgcagtgagccaagatcttgccattgcactccagcctggacaacaagagcaaaactccatctaaaaaaaaaaaaaaatctactctctttgcaaattttaaatatacttacagtacaattaactacagtcacgatgctgtacattagatatctagaatttattcatcccacataactgaaattttataccctttgagtaatagtttcctgattctcccacccccaacccctggaaaccatacctctactgtctgtttccatgagagtgacttttttatgtttcacatatgagcaaggttgtgtagtatttgtctttttgtgtcaggcttatttttcttagttttacatcctccaggttcatcaattctgccataaatggcaggattttcttctttttaatttttttattttcctatttttaattttttgtttgttattgaatcatctgtgtttcttatatattttggatattaaccaaaatatttaagaaatatttggtttgcaaatatgccatttcatggttcacctttcatttgttcattgttttgttttttgtgtggaaattttttagtttgatgtagcctcacttctttatttttccttttgttgcctttgcttctcatatcaaattcaaaaaacggctgcaacgtgaatattagaattttcttcttttgatttctttaaaaatttttatggttttaggtcttagtttaattctttaacccattcaaatttatttttgtttatggtgtaagacaagggtctgatttcatttcattttgagggtttcaccctctcatataataaaattcttctatatacccttctatcatcacttattactgattatatgccttgatttcagaatcttgccaactagattcagaatttgactgggagagaggacaaggaccacttgagactcatattttatttccagaatctagcatctacctacctaggtattgaataagaaaaatgaagttaaggtggttgatggtaacactatgctaataactgcagagccagaagcaccataagggacatgataagggagccagcagacctctgatctcttcctgaatgctaatcttaaacatcctgaggaagaatgggacttccatttggggtgggcctatgacagggtaataagacagtagtgaatatcaagctacaaaaagccgcctttcaaattcttctcagtcctaacttttcatactaagcccagtccttccaaagcagactgtgaaagagtgatagttccgggagactagcactgcagattccgggtcactgtgagtgggggaggcagggaagaagggctcacaggacagtcaaaccatgacccctgtttttccttcttcaagtagacctctataagacaacagagacaactaaggctgagtggccaggcgaggagaaaccatctcgccgtaaaacatggaaggaacacttcaggggaaaggtggtatctctaagcaagagaactgagtggagtcaaggctgagagatgcaggataagcaaatgggtagtgaaaagacattcatgaggacagctaaaacaataagtaatgtaaaatacagcatagcaaaactttaacctccaaatcaagcctctacttgaatccttttctgagggatgaataaggcatatgcatcaggggctgttgccaatgtgcattagctgtttgcagcctcaccttctttcatggagtttaagatatagtgtattttcccaaggtttgaactagctcttcatttctttatgttttaaatgcactgacctcccacattccctttttagtaaaatattcagaaataatttaaatacatcattgcaatgaaaataaatgttttttattaggcagaatccagatgctcaaggcccttcataatatcccccagtttagtagttggacttagggaacaaaggaacctttaatagaaattggacagcaagaaagcgagcttagtgatacttgtgggccagggcattagccacaccagccaccactttctgataggcagcctgcactggtggggtgaattctttgccaaagtgatgggccagcacacagaccagcacgttgcccaggagctgtgggaggaagataagaggtatgaacatgattagcaaaagggcctagcttggactcagaataatccagccttatcccaaccataaaataaaagcagaatggtagctggattgtagctgctattagcaatatgaaacctcttacatcagttacaatttatatgcagaaatatttatatgcagagatattgctattgccttaacccagaaattatcactgttattctttagaatggtgcaaagaggcatgatacattgtatcattattgccctgaaagaaagagattagggaaagtattagaaataagataaacaaaaaagtatattaaaagaagaaagcattttttaaaattacaaatgcaaaattaccctgatttggtcaatatgtgtacacatattaaaacattacactttaacccataaatatgtataatgattatgtatcaattaaaaataaaagaaaataaagtagggagattatgaatatgcaaataagcacacatatattccaaatagtaatgtactaggcagactgtgtaaagtttttttttaagttacttaatgtatctcagagatatttccttttgttatacacaatgttaaggcattaagtataatagtaaaaattgcggagaagaaaaaaaaagaaagcaagaattaaacaaaagaaaacaattgttatgaacagcaaataaaagaaactaaaacgatcctgagacttccacactgatgcaatcattcgtctgtttcccattctaaactgtaccctgttacttatccccttcctatgacatgaacttaaccatagaaaagaaggggaaagaaaacatcaagcgtcccatagactcaccctgaagttctcaggatccacgtgcagcttgtcacagtgcagctcactcagtgtggcaaaggtgcccttgaggttgtccaggtgagccaggccatcactaaaggcaccgagcactttcttgccatgagccttcaccttagggttgcccataacagcatcaggagtggacagatccccaaaggactcaaagaacctctgggtccaagggtagaccaccagcagcctaagggtgggaaaatagaccaataggcagagagagtcagtgcctatcagaaacccaagagtcttctctgtctccacatgcccagtttctattggtctccttaaacctgtcttgtaaccttgataccaacctgcccagggcctcaccaccaacttcatccacgttcaccttgccccacagggcagtaacggcagacttctcctcaggagtcagatgcaccatggtgtctgtttgaggttgctagtgaacacagttgtgtcagaagcaaatgtaagcaatagatggctctgccctgacttttatgcccagccctggctcctgccctccctgctcctgggagtagattggccaaccctagggtgtggctccacagggtgaggtctaagtgatgacagccgtacctgtccttggctcttctggcactggcttaggagttggacttcaaaccctcagccctccctctaagatatatctcttggccccataccatcagtacaaattgctactaaaaacatcctcctttgcaagtgtatttacgtaatatttggaatcacagcttggtaagcatattgaagatcgttttcccaattttcttattacacaaataagaagttgatgcactaaaagtggaagagttttgtctaccataattcagctttgggatatgtagatggatctcttcctgcgtctccagaatatgcaaaatacttacaggacagaatggatgaaaactctacctcggttctaagcatatcttctccttatttggattaaaaccttctggtaagaaaagaaaaaatatatatatatatgtgtgtatatatacacacatacatatacatatatatgcattcatttgttgttgtttttcttaatttgctcatgcatgctaataaattatgtctaaaaatagaataaatacaaatcaatgtgctctgtgcattagttacttattaggttttgggaaacaagagataaaaaactagagacctcttaatgcagtcaaaaatacaaataaataaaaagtcacttacaacccaaagtgtgactatcaatggggtaatcagtggtgtcaaataggaggttaactggggacatctaactgtttctgcctggactaatctgcaagagtgtctgggggaacaaaaagcctctgtgacttagaaagtaggggtaggaggggaaaaggtcttctacttggctcagattatttttttcctctagtccactaagaatactgcgttttaaaatcatttccttgattcaagttcctatttctctttatattttgtttgtttaaacctcctttactaaaatttactcttctttctctatagcttcccaacgtgatcgcctttctcccatccccctgtactttttccccttgtactaaattaactcctcaggtgaggaaaaacttttgaagtgcagagttctgcttcctgctattaaaagatgtaattaaaacagcaaaggtagcaagcatttatgaggtcagcgtagggtctcagtgttccctaagggccctgtcagtcatcctgaatcctgcccctacctggaaacccatgtcggtttagtaaggaaagtgttatacttttactttgcatgtttctcctacttcttcctttcagctctaacactctgaaactacgattacacaaaataaaataaaataaaataaaataaaacaataaaatgaaataaaatttaggttaaccaaaagaaactggatcctctatttctagttatcagaaggaaatttacaaatttcttatttccattgctttattctcttaaatgctttctctattattgctaaataaatagagatctctcactttttctacctgtctcaaccctcatcaggtacttgtgaaaaaatctcactctgattattctcacacacgcagaaagtgtttggttcttctatggctatctggagcctaggttaaaaaattatgcctatgtatgattatagaggtaagagggataaaatttaagtattttctttttatattcattcctctgtaaaaaactaaagcaatgaggatctaggcacacgtgtatccctgagaaaagatttcacatgttgaatcctgggaaaagacgtctttaaaatattttaaatgttaaaacatgcagatttgacttggctgttagattttggattttattttattaaatttaaacctgcattagcattgttttagatttagacagttttcaagaccctgtttcacatccctgatataagaggcatgtatatgtgaaataaagtgttctgcggaagtttgaatatgtcttttgcaaatatcctgggtcaaagaaaatgcacagactttatgaaattataatataggttatatttatagtattctgaaagaccaaaattgtcaaagcaagagctttgaaatcctgattggcagaaattgtcaccttcttaaagacttaccctacaacttcttatgctcagaaatagttttcctttttctattttgttttcttttttaaatgatgaactatggatccttctcttgtgttggcaactgctgcagataccatcatcctggcttcaaggcaggggttgcttttccaatggtagttacttagtgtgactagagtgtaacgcagacttttctttctattacccataataccctgcagggacaaggctgcaagctatactaagaccatcaaaagcccaggcataccaggcaaataagtttcaagaagcaataaatagtgcaaatttggttatggtcagagcctcagtttcaaatctaaatcagcattcaaagttcctgaaaaactattcaagcttactgacatcttcactattgtgagcttgcttctactctgtgaatggatgccacagcaggtgcaggtctattctacttttattccagccccactgaccacaacacacacacacacacacacacacacacacacacaagtcctcaaaaaagagacagcgagagagacagaggtccatttcctttactccagtctattaatctttcttaagtcctaatgttttatatcagaatggccctagtctgggtatacttagaggatgaatattaacttcctccatgaaaatcatgacactcatctatgggagtgtggttttatcatttgtttcaaaagcagcacttgactagagtatttttatacatgctctactgtttagtctaaaattccccaagtgagacattttagcaatctactgtatatgttcctaggtcaagcacagtctagctacttgctacagacttctctcgcagatacacaatctctcagtaaacacaactcagcagctctcagaattaattaattaaaatgaaataaaaatgctccaagaaaaccagaacccatagaaacaaaccgcacacacacaaaatagtttggaaataggatagtttagttcactttaaaaagttgtatttcttaccaaaaagcaataaagtcaacatagacagaactttgctaaagtatatgcataattattacagaaaaatttatatttcagtctgcaccttgttcattaatatttcctccactgggctcagattttcattcagaattagcttttttttaacctcattaagtgggccatggtgtcaatttatggagagcagaggtacagtcttcagataaatttgagattgcatctctttagaggtagaatcttggcttcagtctgaacaccctttacaaacatgtaggcattaattcagaggactgctctgaagctcaagagatggatgatttaggagactattaggcttaattctcctgacattaaattattttattgaaaaattttcatgaactcaaattcacattattacgtcctctcttcccttcctctctccctctctttcacacacacacacaccctttcattcagacatactgaacatagtttataaagcaacgccatagtgagaaaagaaaaacaaccatttgataaattatcaaataaaattaaagccaaatcttgaggaattaattccattcctatactttgttttaactttcattttaaatttgggggtacatgtacaagttatataggtaaattgcatatcactgggtcttgatgtacagattatttcatcactcagtgatgaacttaatacccaataggttctttttcatcgtctccctcttcccaccctcaaccctcaagtaggcctgggtgtctgttgatctattttttgtgtccatgtgtatcatcatttagctcccacactcctagactcttacaaaagctctactctaacaaataattttaatataacaacaaggtgccaagtcttttttcatctcttgacctcctcatcttcaatatgaagatagcaatgcctagcatatagtaattgtgtgtgctcggcacatgtcccatccaggtgatgttctcatgaattctctggtatttggatttttagggccaacatcttgcctagactcactgactacttctaatggtgtaggaatagaaggtatagtaagctatatttgctctttttttttgacttttggagaaaggaatgtagtttgttttccctatcaagatcataaggtctacaatctctcttactgtctttcgaataccacacaagtatctccttttaatatcttactcttatgagaacttccctatgctcaggaatgtgaaagtgatcttccccaaaatgccctgagtagctctgcttctgatatgtaaaccagtggttcctaaatatcttattcagatataaagagttctcagtgcctactatgtataatgacttaaggaaaacacatggatataaaagagcttctgctgccagtcaattcaaaatgttgtgatcaaaacagttaactataacacattgtcagtatattctggcagtacagacagagttactgtgaaagcactttcaaacacaaggaaacaacagattctgtttaggtattcaagtaagtttaaaattaatcaacatgcatataatacagatttttaaaaatgtatacaactgagaaagttctaaaaatccttctaattttacctatggcaaaaatggtgctcaaggaaaaaaatattactcctatgatcagaaaggaaataactgttcggttgtttactgcatgcttcctctttgtatgttgtagcattaacaacaaagaaacactgtgcgatggtattattaatattgtcctctaattccagaagttctaaagcaaggaataatcattccttcatttactcatttactcattcgttcattcattcactgttttcttgaataaatattttctttctgcccattgatgaatttaatatgaggcacagtaggcatgtaagaaggtagagaataggcagaattgcttataaagcacggagtgtgtgtgtgtgcatgaaataaataagaaaaatataaaaatataaaaaatggtgtgggggagggtttggaaagattttttgggtagtatagagaagtttattgtggctggggtcaagagaggtcacaagtaatacgtgagcaatgaatcttgactgaaatatgggaagataagaggaaattctttacagagatgttctggggcaagtaagaggaggaagctatttcttggagcaggaacacttgatggggtatagtattatgggctacaatgtgcaggcaaaggaaggaggaagaaagacaacataacattgtcttgagtaatcattatgcctttaattgagcacattattttctcagtaattgttggagtttaatcgtagcattacccttgaggctatgtcttagggttgaggtcttccctagaacctctgcagtgccagtattatctttgtatcaagagttcttgataatttctgctctttggaggtagaagtgtcacccattaatgccttgtacggttcccttgcttttctcttttcccatgtactctttgtaaaataaacaagtgctccctatctgtagagcctcaggaaccttcttacacacctggacaaaaaaatgaaataagtgaaattaatcaggaagttgagctgaacattctttattaggcagaagccatacccttgaagtaggcattgtgttcccaagttcagaaaatagaatctagggaaatagggtcttcttatggttatcaggaaacagtccaggatctcaatggtacttgtgagccagggcattagccacaccagccaccaccttctgataggcagcctgcatttgtggggtgaattccttgccaaagttgcgggccagcacacacaccagcacattgcccaagagctgcggagaagaggtaggcagatacatgcatatggttaacagagaaataaagactggcttctgagaaactgagccaacacccatttttttctgcccaaatcttagacaaaactgatccccaggttattcccatcagcataaataagtacatatatgaatgcatacatataacatatatctatacacacacatcctctatgtacttaactagcatgtagtctatatatgtacatatatgctatatatgctgtataatactatatacaaattaattccaaattagttttaattttgtatgtgtatatagcatatacaaattaattactataaacagattaatagatacaaattaattgattaatcagtgtgatgatgggctgtctcctagcaacgacttctgccccacctccagtgtaactgcctagtctttcataatcaaatattcactttcctttccattccatttactacagaatttataaaattccaattattccttattgtaaaatgatttatagcctctaaaacagtattctatgcctctcatctttgagttggagcctctcccatacccatgtggagagacaaaaggattattctaagtgcagaattagcaggtgagagctggtatgcataatttgagttgttgttagagaaggaaaaatgaagggagggggttgggagagaaagacaggatattaaataatttaaaatagcaagattgtgaggaaggaaaaaatgcagaatatttaaataaaaaattaacaaaattttagaagcattaaatgataaaatatagtaaaatgacaaaaatgtgggagaagagcaggtaggtaaaagaaccaaaatgtaagattagaaagtaaaaagagaaaagtgaagcatctcctggactcaccctgaagttctcaggatccacgtgcagcttgtcacagtgcagctcactcagctgagaaaaagtgcccttgaggttgtccaggtgagccaggccatcactaaaggcacctagcaccttcttgccatgagccttcaccttagggttgcccataacagcatcaggagaggacagatccccaaaggactcaaagaacctctgggtccaagggtagaccaccagtaatctgagggtaggaaaacagcccaagggacagagagtcagtgcctatcagaaacccaagagtcttctctgtctacacatgcccagtttccatttgcctccttgagcctctcttataaccttgataccaacctgcccagggcctcaccaccaactgcatccacgttcactttgccccacagggcattgacagcagtcttctcctcaggagtcagatgcaccatggtgtctgtttgaggttgctagtgaacactgttatgtcagaagaaagtgtaagcaacagtcgactctgccctgccttttatgctggtcctgtcctccctgctccagtgagcaggttggtttaagataagcagggtttcattagtttgtgagaatgaaaaatgaaccttcattccactattcccttaacttgccctgagattggctgttctgtcatgtgtgtcttgactcagaaaccctgttctcctctacatatctccccaccgcatctctttcagcagttgtttctaaaaatatcctcctagtttcatttttgcagaagtgttttaggctaatatagtggaatgtatcttagagtttaacttatttgtttctgtcactttatactaagaaaacttatctaaaagcagatgttttaacaagttgactcaatataaagttcttctttgcctctagagatttttgtctccaagggaattttgagaggttggaatggacaaatctattgctgcagtttaaacttgcttgcttcctccttcttttggtaaattcttcctataataaaactctaattttttattatattgaaataaatatccattaaaagaatatttaaaaaatgaatagtgtttatttaccagttattgaaataggttctggaaacatgaattttaaggttaacattttaatgacagataaaatcaaatattatatacaaatattttgaatgtttaaaattatggtatgactaaagaaagaatgcaaagtgaaaagtagatttaccatattcagccagattaaatttaacgaagttcctgggaatatgctagtacagaacatttttacagatgtgttcttaaaaaaaaatgtggaattagacccaggaatgaagatcccagtagtttttcactcttttctgaattcaaataatgccacaatggcagacaaatacacacccatgagcatatccaaaaggaaggattgaaggaaagaggaggaagaaatggagaaaggaaggaaggaagaggggaagagagaggatggaagggatggaggagaagaaggaaaaataaataatggagaggagaggagaaaaaaggaggggagaggagaggagaagggatagggaagagaaagagaaagggaagggaagagaggaaagaagagaagaggagagaaaagaaacgaagagaggggaagggaaggaaaaaaaagaggaaaaaagagacaagagaagagataagactgacagttcaaattttggtggtgatatggatcaatagaaactcaaactctgttggtgacactgtacaatagtataacccctttggaaaacctttaatagtatccacaaatgctggatgcttgataagtctattacctagcaattacatttttagatattcagaaacacatgcatgtgtgtatccaaagacatgtatagaaatgcttatgacagcaataatcataaaaacctcaaaccggtagccacttaaatgcttaccaacagtagaattgataaattacggtatagtcaaagaatagaatattacacagaaatgaaaagaatcaactactgcttaacacgtagcgatacaaatgcattttacagcatttggttgattaaaagtaaccagaggtgagttcaaactatatgactttatttgtatatagaaagatggatgatgtgcctgagattctgatcacaaggggaaatgttataaaatagggtagagaggagccatgaatgacctttaaactttgttacaagttatttttctgtaacctggaagccaacgaaagatattgaataattcaagaaaggtggtggcatggtttgatttgtgtctttaaaagattattctcacttagtgaagaaatgtattttagaagtagagaaaatgggagacaaatagctgggcttctgttgcagtagggaagaaagtgacaatgccatttctattatcagacttggaccatgacggtgatgtcagtcgtgaacacaagaatagggccacatttgtgagtttagtggtacgataaaatcagaaatacagtcttggatacattgtattgtatgcactcttgtaaaatgcaaaaagatgtacttagatatgtggatctggagctcagaaagaatacaaccaggtcaagaatacagaatggaacagaacatacaagaacagatcataatgtgctgtgtgaatcactaccactacctgttaaaaatgacagatgatgtacttcatcaatatctccttaaaatcttagaatgtgtttgtgagggaggaattatgtttccaattcatatataagaaaattgattctaaaaaaaatgttaggtaaattcttaaggccatgaggactgttatttgatctttgtctgttaattccaaagacttggcttttcactttaattctgttctacctgaaatgattttacacattgggagatctggttacatgtttattctatatggattgcattgagaggatttgtataacagaataaggtctttttttcttttctcttctgagatggagtttcatccctattgcccaagctagagtgcaatggtgcaatctaggctcaccgcaacctctgcctcctgggttcaagcaattctcctgcctcagccacctgaatagctgggactgcaggcatgcaccacacgcccggctgattttgtatttttagtagagatggggtttcaccatgttggtcaggctggtcttgaactcctgacctcaagtgatctgcctgccttggcctcccaaagtgctgggtttacaagcctgagccaccgcatccagccaggataaggtctaaaagtggaaagaatagcatctactcttgttcaggaaacaatgaggacctgactgggcagtaagagtggtgattaatagatagggacaaattgaagcagaatcgaactgttgattagaggtagggaaatgattttaatctgtgaccttggtgaatgggcaagtagctatctaatgactaaaatggaaaacactggaagagaaacagttttagtataacaagtgaaatacccatgctgagtctgaggtgcctataggacatctatataaataagcccagtacattgtttgatatatgggtttggcactgaggttggaggtcagaggttagaaatcagagttgggaattgggattatacaggctgtatttaagagtttagatataactgtgaatccaagagtgtgatgaatacaaagttaaatgaaggacctttaatgaacaccaacatttaatgtgaaatctcaaggaagtatgaagtaagacatagtccccaaaatccccgatgattttagaactcagtatcgattttaattagtgtaatgccaatgtgggttagaatggaagtcaacttgctgttggtttcagagcaggtaggagataaggttctagattttgacacagtgaaaagctgaaacaaaaaggaaaaggtagggtgaaagatgggaaatgtatgtaaggaggatgagccacatggtatgggaggtatactaaggactctagggtcagagaaatatgggttatatccttctacaaaattcacattcttggctgggtgtggtggctcacgcctgtgatcccagcactttcagaggccgaggagggtggatcacctgatgttaggagttcgagatcagcctgaccaacatggtgaaaccccctatctactaaaaatagaaaattagccaggcatggtggtggcacatgcctgtagtgccagctacttgggaggctgaggcaggagaatcgcttgaacctgggaggcagatgttgcagtgagcctggatcatgccattgcactccagcctgggcaaccatagcaatgctctatctcagaaaaaaaaaaaaaaagttcttgctaacctgaaaaaataaattatttgagctttgtacctaattcataattttcagataatgaatattgagatgatatatgcacagaacaatgcctagagacacattctaagtgtgacattcttaaatgccagtgctctccacaattctaatctcagttcactgctgtttgaattctgtgttttcatattatcttatcaatacattaatcattgcaataatcactgcacactgtaattattcatttactggacacatcctagtttccttctgtcaattaccattcatgtctgctttcacatttatttctcatccttccctcagtgttctctgtatttgaggaactgacatttcccaggtttcctcaccctttcagtcgcatgtacattctgcaatggtaaacactggctgagggaaagcataagcaagattatttctggtctctctctctctctgaacggatctcctacagcagacagtcttttttatggttttttatggctgatactttgatgcccccattagacagttctggctctctccaaggagcacccactagctcactgaatccagtggacctctggttatgggctctggttctggactctggtggtataaacattttctccttctgcccttctaggcctaatggcggaagaggttttctgatgttactaacatctagatttctgcactgtcctttatttgatattttagctcttccaatacaaggataattaac

SEQ ID NO: 507 - DNA, 25800 bp, Homo sapiens
tcttgatgatatgttaaacaagttttggattatttatgccttctctttttaggccatatagggtaactttctgacattgccatggcatttttcttttaatttaatttactgttaccttaaattcaggggtacacgtacaggatatgcaggtttgttttataggtaaaagtgtgccatggttttaatgggttttttttttcttgtaaagttgtttaagtttcttgtttactctggatattaggcctttgtcagaagaatagattggaaaatctttttcccattctgtagattgtctttcgctctgatggtagtttcttttgctgagcaggagctctttagtttaattagattccattggtcaatttttgcttttgctgcaattgcttttcacgctttcatcatgaaatctgtgcccgtgtttatatcatgaatagtattgccttgatttttttctaggctttttatagtttggggtttttcatttaagtctctaatccatctggagttaattttggataaggtataaggaaggagtccagtttcatttttcagcatatggctagccagttctcccccatcatttattaaattgaaaatcctttccccattgcttgcttttgtcaggtttctaaaagaccagatggttgtaggtacaatatgcagtttcttcaagtcatataataccatctgaaatctcttattaattcatttcttttagtatgtatgctggtctcctctgctcactatagtgagggcaccattagccagagaatctgtctgtctagttcatgtaagattctcagaattaagaaaaatggatggcatatgaatgaaacttcatggatgacatatggaatctaatatgtatttgttgaattaatgcataagatgcaacagagagaagttgacaactgcaatgataacctggtattgatgatataagagtctatagatcacagtagaagcaataatcatggaaaacaattggaaatggggaacagccacaaacaagaaagaatcaatacttccaggaaagtgactgcaggtcacttttcctggagcgggtgagagaaaagtggaagttagcagtaactgctgaattcctggttggctgatggaaagatggggcagctgttcactggtacgcagggttttagatgtatgtacctaaggatatgaggtatggcaatgaacagaaattcttttgggaatgagttttagggccattaaaggacatgacctgaagtttcctctgaggccagtccccacaactcaatataaatgtgtttcctgcatatagtcaaagttgccacttctttttcttcatatcatcgatctctgctcttaaagataatcttggttttgcctcaaactgtttgtcactacaaactttccccatgttcctaagtaaaacaggtaactgcctctcaactatatcaagtagactaaaatattgtgtctctaatatcagaaattcagctttaatatattgggtttaactctttgaaatttagagtctccttgaaatacacatgggggtgatttcctaaactttatttcttgtaaggatttatctcaggggtaacacacaaaccagcatcctgaacctctaagtatgaggacagtaagccttaagaatataaaataaactgttcttctctctgccggtggaagtgtgccctgtctattcctgaaattgcttgtttgagacgcatgagacgtgcagcacatgagacacgtgcagcagcctgtggaatattgtcagtgaagaatgtctttgcctgattagatataaagacaagttaaacacagcattagactatagatcaagcctgtgccagacacaaatgacctaatgcccagcacgggccacggaatctcctatcctcttgcttgaacagagcagcacacttctcccccaacactattagatgttctggcataattttgtagatatgtaggatttgacatggactattgttcaatgattcagaggaaatctcctttgttcagataagtacactgactactaaatggattaaaaaacacagtaataaaacccagttttccccttacttccctagtttgtttcttattctgctttcttccaagttgatgctggatagaggtgtttatttctattctaaaaagtgatgaaattggccgggcgcggtggctcacacctgtaatcccagcactttgggaggctgaggtgggcggatcacgaggtcaggagatcaagaccatcctggctaacatggtgaaaccccatctctactaaaaatacaaaaaattagccagagacagtggcgggtgcctgtagtcccagctactcgggaggctgaggcaggagaatggcgtgaacctgggaggcagagcttgcggtgagcagagatcgcgccactgcacactccagcctgggtgacaaagcgagactccatctcaaaaaaaaaaaaaaaaaaaagaaaaagaaagaaagaaagaaaaaaaaactgatgaaattgtgtattcaatgtagtctcaagagaattgaaaaccaagaaaggctgtggcttcttccacataaagcctggatgaataacaggataacacgttgttacattgtcacaactcctgatccaggaattgatggctaagatattcgtaattcttatccttttcagttgtaacttattcctatttgtcagcattcaggttattagcggctgctggcgaagtccttgagaaataaactgcacactggatggtgggggtagtgtaggaaaatggaggggaaggaagtaaagtttcaaattaagcctgaacagcaaagttcccctgagaaggccacctggattctatcagaaactcgaatgtccatcttgcaaaacttccttgcccaaaccccacccctggagtcacaacccacccttgaccaatagattcattttactgagggaggcaaagggctggtcaatagattcatttcactgggagaggcaaagggctgggggccagagaggagaagtaaaaagccacacatgaagcagcaatgcaggcatgcttctggctcatctgtgatcaccaggaaactcccagatctgacactgtagtgcatttcactgctgacaagaaggctgctgccaccagcctgtgaagcaaggttaaggtgagaaggctggaggtgagattctgggcaggtaggtactggaagccgggacaaggtgcagaaaggcagaaagtgtttctgaaagagggattagcccgttgtcttacatagtctgactttgcacctgctctgtgattatgactatcccacagtctcctggttgtctacccatggacctagaggtactttgaaagttttggatatctgggctctgactgtgcaataatgggcaaccccaaagtcaaggcacatggcaagaaggtgctgatctccttcggaaaagctgttatgctcacggatgacctcaaaggcacctttgctacactgagtgacctgcactgtaacaagctgcacgtggaccctgagaacttcctggtgagtagtaagtacactcacgctttcttctttacccttagatatttgcactatgggtacttttgaaagcagaggtggctttctcttgtgttatgagtcagctatgggatatgatatttcagcagtgggattttgagagttatgttgctgtaaataacataactaaaatttggtagagcaaggactatgaataatggaaggccacttaccatttgatagctctgaaaaacacatcttataaaaaattctggccaaaatcaaactgagtgtttttggatgagggaacagaagttgagatagagaaaataacatctttcctttggtcagcgaaattttctataaaaattaatagtcacttttctgcatagtcctggaggttagaaaaagatcaactgaacaaagtagtgggaagctgttaaaaagaggattgtttccctccgaatgatgatggtatacttttgtacgcatggtacaggattctttgttatgagtgtttgggaaaattgtatgtatgtatgtatgtatgtatgtgatgactggggacttatcctatccattactgttccttgaagtactattatcctactttttaaaaggacgaagtctctaaaaaaaaaatgaaacaatcacaatatgttggggtagtgagttggcatagcaagtaagagaaggataggacacaatgggaggtgcagggctgccagtcatattgaagctgatatctagcccataatggtgagagttgctcaaactctggtgaaaaaggatgtaagtgttatatctatttactgcaagtccagcttgaggccttctattcactatgtaccattttcttttttatcttcactccctccccagctcttaggcaacgtgatattgattgttttggcaacccacttcagcgaggattttaccctacagatacaggcttcttggcagtaactaacaaatgctgtggttaatgctgtagcccacaagaccactgagttccctgtccactatgtttgtacctatggtccactatgtttgtacctatgtcccaaaatctcatctcctttagatgggggaggttggggagaagagcagtatcctgcctgctgattcagttcctgcatgataaaaatagaataaagaaatatgctctctaagaaatatcattgtactctttttctgtctttatattttaccctgattcagccaaaaggacgcactatttctgatggaaatgagaatgttggagaatgggagtttaaggacagagaagatactttcttgcaatcctgcaagaaaagagagaactcgtgggtggatttagtggggtagttactcctaggaaggggaaatcgtctctagaataagacaatgtttttacagaaagggaggtcaatggaggtactctttggaggtgtaagaggattgttggtagtgtgtagaggtatgttaggactcaaattagaagttctgtataggctattatttgtatgaaactcaggatatagctcatttggtgactgcagttcacttctacttattttaaacaacatattttttattatttataatgaagtggggatggggcttcctagagaccaatcaagggccaaaccttgaactttctcttaacgtcttcaatggtattaatagagaattatctctaaggcatgtgaactggctgtcttggttttcatctgtacttcatctgctacctctgtgacctgaaacatatttataattccattaagctgtgcatatgatagatttatcatatgtattttccttaaaggatttttgtaagaactaattgaattgatacctgtaaagtctttatcacactacccaataaataataaatctctttgttcagctctctgtttctataaatatgtacaagttttattgtttttagtggtagtgattttattctctttctatatatatacacacacatgtgtgcattcataaatatatacaatttttatgaataaaaaattattagcaatcaatattgaaaaccactgatttttgtttatgtgagcaaacagcagattaaaaggctgagatttaggaaacagcacgttaagtcaagttgatagaggagaatatggacatttaaaagaggcaggatgatataaaattagggaaactggatgcagagaccagatgaagtaagaaaaatagctatcgttttgagcaaaaatcactgaagtttcttgcatatgagagtgacataataaatagggaaacgtagaaaattgattcacatgtatatatatatatagaactgattagacaaagtctaacttgggtatagtcagaggagcttgctgtaattatattgaggtgatggataaagaactgaagttgatggaaacaatgaagttaagaaaaaaaatcgagtaagagaccattgtggcagtgattgcacagaactggaaaacattgtgaaacagagagtcagagatgacagctaaaatccctgtctgtgaatgaaaagaaggaaatttattgacagaacagcaaatgcctacaagccccctgtttggatctggcaatgaacgtagccattctgtggcaatcacttcaaactcctgtacccaagacccttaggaagtatgtagcaccctcaaacctaaaacctcaaagaaagaggttttagaagatataataccctttcttctccagtttcattaatcccaaaacctctttctcaaagtatttcctctatgtgtccaccccaaagagctcacctcaccatatctcttgagtgggagcacatagataggcggtgctaccatctaacagcttctgaaattcctttgtcatatttttgagtccccactaataacccacaaagcagaataaataccagttgctcatgtacaataatcactcaactgctgtcttgtagcatacattaattaagcacattctttgaataattactgtgtccaaacaatcacactttaaaatctcacacttgtgctatcccttgcccttctgaatgtcactctgtattttaaatgaagagatgagggttgaatttcctgtgttacttattgttcatttctcgatgaggagttttcacattcacctttagtggaaaacacataagtacacatcttacaggaaaaatataccaaactgacatgtagcatgaatgcttgtgcatgtagtcatataaaatcttgtagcaatgtaaacattctctgatatacacatacagatgtgtctatatgtctacacaatttcttatgctccatgaacaaacattccatgcacacataagaacacacactgttacagatgcatacttgagtgcattgacaaaattaccccagtcaatctagagaatttggatttctgcatttgactctgttagctttgtacatgctgttcatttactctgggtgatgtctttccctcattttgccttgtctatcttgtactcatactttaagtcctaacttatatgttatctcaactaagaagctatttttttttaattttaactgggcttaaagccctgtctataaactctgctacaattatgggctctttcttataatatttagtgtttttcctactaatgtacttaatctgctcattgtatattcctaccactaaattttaacctcttttatggtagagacattgtcttgtaaactcttatttccctagtatttggagatgaaaaaaaagattaaattatccaaaattagatctctcttttctacattatgagtattacactatccatagagaagtttgtttgagacctaaactgaggaacctttggttctaaaatgactatgtgatatcttagtatttataggtcatgaggttccttcctctgcctctgctatagtttgattagtcaacaagcatgtgtcatgcatttattcacatcagaatttcatacactaataagacatagtatcagaagtcagtttattagttatatcagttagggtccatcaaggaaaggacaaaccattatcagttactcaacctagaattaaatacagctcttaatagttaattatccttgtattggaagagctaaaatatcaaataaaggacagtgcagaaatctagatgttagtaacatcagaaaacctcttccgccattaggcctagaagggcagaaggagaaaatgtttataccaccagagtccagaaccagagcccataaccagaggtccactggattcagtgagctagtgggtgctccttggagagagccagaactgtctaatgggggcatcaaagtatcagccataaaaaaccataaaaaagactgtctgctgtaggagatccgttcagagagagagagagaccagaaataatcttgcttatgctttccctcagccagtgtttaccattgcagaatgtacatgcgactgaaagggtgaggaaacctgggaaatgtcagttcctcaaatacagagaacactgagggaaggatgagaaataaatgtgaaagcagacatgaatggtaattgacagaaggaaactaggatgtgtccagtaaatgaataattacagtgtgcagtgattattgcaatgattaatgtattgataagataatatgaaaacacagaattcaaacagcagtgaactgagattagaattgtggagagcactggcatttaagaatgtcacacttagaatgtgtctctaggcattgttctgtgcatatatcatctcaatattcattatctgaaaattatgaattaggtacaaagctcaaataatttattttttcaggttagcaagaactttttttttttttttctgagatagagcattgctatggttgcccaggctggagtgcaatggcatgatccaggctcactgcaacatctgcctcccaggttcaagcgattctcctgcctcagcctcccaagtagctggcactacaggcatgtgccaccaccatgcctggctaattttctatttttagtagatagggggtttcaccatgttggtcaggctgatctcgaactcctaacatcaggtgatccaccctcctcggcctctgaaagtgctgggatcacaggcgtgagccaccacacccagccaagaatgtgaattttgtagaaggatataacccatatttctctgaccctagagtccttagtatacctcccataccatgtggctcatcctccttacatacatttcccatctttcaccctaccttttcctttttgtttcagcttttcactgtgtcaaaatctagaaccttatctcctacctgctctgaaaccaacagcaagttgacttccattctaacccacattggcattacactaattaaaatcgatactgagttctaaaatcatcggggattttggggactatgtcttacttcatacttccttgagatttcacattaaatgttggtgttcattaaaggtccttcatttaactttgtattcatcacactcttggattcacagttatatctaaactcttaaatacagcctgtataatcccaattcccaactctgatttctaacctctgacctccaacctcagtgccaaacccatatatcaaacaatgtactgggcttatttatatagatgtcctataggcacctcagactcagcatgggtatttcacttgttatactaaaactgtttctcttccagtgttttccattttagtcattagatagctacttgcccattcaccaaggtcacagattaaaatcatttccctacctctaatcaacagttcgattctgcttcaatttgtccctatctattaatcaccactcttactgcccagtcaggtcctcattgtttcctgaacaagagtagatgctattctttccacttttagaccttatcctggctggatgcggtggctcaggcttgtaaacccagcactttgggaggccaaggcaggcagatcacttgaggtcaggagttcaagaccagcctgaccaacatggtgaaaccccatctctactaaaaatacaaaatcagccgggcgtgtggtgcatgcctgcagtcccagctattcaggtggctgaggcaggagaattgcttgaacccaggaggcagaggttgcggtgagcctagattgcaccattgcactctagcttgggcaatagggatgaaactccatctcagaagagaaaagaaaaaaagaccttattctgttatacaaatcctctcaatgcaatccatatagaataaacatgtaaccagatctcccaatgtgtaaaatcatttcaggtagaacagaattaaagtgaaaagccaagtctttggaattaacagacaaagatcaaataacagtcctcatggccttaagaatttacctaacattttttttagaatcaattttcttatatatgaattggaaacataattcctccctcacaaacacattctaagattttaaggagatattgatgaagtacatcatctgtcatttttaacaggtagtggtagtgattcacacagcacattatgatctgttcttgtatgttctgttccattctgtattcttgacctggttgtattctttctgagctccagatccacatatctaagtacatctttttgcattttacaagagtgcatacaatacaatgtatccaagactgtatttctgattttatcgtaccactaaactcacaaatgtggccctattcttgtgttcacgactgacatcaccgtcatggtccaagtctgataatagaaatggcattgtcactttcttccctactgcaacagaagcccagctatttgtctcccattttctctacttctaaaatacatttcttcactaagtgagaataatcttttaaagacacaaatcaaaccatgccaccacctttcttgaattattcaatatctttcgttggcttccaggttacagaaaaataacttgtaacaaagtttaaaggtcattcatggctcctctctaccctattttataacatttccccttgtgatcagaatctcaggcacatcatccatctttctatatacaaataaagtcatatagtttgaactcacctctggttacttttaatcaaccaaatgctgtaaaatgcatttgtatcgctacgtgttaagcagtagttgattcttttcatttctgtgtaatattctattctttgactataccgtaatttatcaattctactgttggtaagcatttaagtggctaccggtttgaggtttttatgattattgctgtcataagcatttctatacatgtctttggatacacacatgcatgtgtttctgaatatctaaaaatgtaattgctaggtaatagacttatcaagcatccagcatttgtggatactattaaaggttttccaaaggggttatactattgtacagtgtcaccaacagagtttgagtttctattgatccatatcaccaccaaaatttgaactgtcagtcttatctcttctcttgtctcttttttcctcttttttttccttcccttcccctctcttcgtttcttttctctcctcttctcttctttcctctcttcccttccctttctctttctcttccctatcccttctcctctcctctcccctccttttttctcctctcctctccattatttatttttccttcttctcctccatcccttccatcctctctcttcccctcttccttccttcctttctccatttcttcctcctctttccttcaatccttccttttggatatgctcatgggtgtgtatttgtctgccattgtggcattatttgaattcagaaaagagtgaaaaactactgggatcttcattcctgggtctaattccacatttttttttaagaacacatctgtaaaaatgttctgtactagcatattcccaggaacttcgttaaatttaatctggctgaatatggtaaatctacttttcactttgcattctttctttagtcataccataattttaaacattcaaaatatttgtatataatatttgattttatctgtcattaaaatgttaaccttaaaattcatgtttccagaacctatttcaataactggtaaataaacactattcattttttaaatattcttttaatggatatttatttcaatataataaaaaattagagttttattataggaagaatttaccaaaagaaggaggaagcaagcaagtttaaactgcagcaatagatttgtccattccaacctctcaaaattcccttggagacaaaaatctctagaggcaaagaagaactttatattgagtcaacttgttaaaacatctgcttttagataagttttcttagtataaagtgacagaaacaaataagttaaactctaagatacattccactatattagcctaaaacacttctgcaaaaatgaaactaggaggatatttttagaaacaactgctgaaagagatgcggtggggagatatgtagaggagaacagggtttctgagtcaagacacacatgacagaacagccaatctcagggcaagttaagggaatagtggaatgaaggttcatttttcattctcacaaactaatgaaaccctgcttatcttaaaccaacctgctcactggagcagggaggacaggaccagcataaaaggcagggcagagtcgactgttgcttacactttcttctgacataacagtgttcactagcaacctcaaacagacaccatggtgcatctgactcctgaggagaagactgctgtcaatgccctgtggggcaaagtgaacgtggatgcagttggtggtgaggccctgggcaggttggtatcaaggttataagagaggctcaaggaggcaaatggaaactgggcatgtgtagacagagaagactcttgggtttctgataggcactgactctctgtcccttgggctgttttcctaccctcagattactggtggtctacccttggacccagaggttctttgagtcctttggggatctgtcctctcctgatgctgttatgggcaaccctaaggtgaaggctcatggcaagaaggtgctaggtgcctttagtgatggcctggctcacctggacaacctcaagggcactttttctcagctgagtgagctgcactgtgacaagctgcacgtggatcctgagaacttcagggtgagtccaggagatgcttcacttttctctttttactttctaatcttacattttggttcttttacctacctgctcttctcccacatttttgtcattttactatattttatcatttaatgcttctaaaattttgttaattttttatttaaatattctgcattttttccttcctcacaatcttgctattttaaattatttaatatcctgtctttctctcccaaccccctcccttcatttttccttctctaacaacaactcaaattatgcataccagctctcacctgctaattctgcacttagaataatccttttgtctctccacatgggtatgggagaggctccaactcaaagatgagaggcatagaatactgttttagaggctataaatcattttacaataaggaataattggaattttataaattctgtagtaaatggaatggaaaggaaagtgaatatttgattatgaaagactaggcagttacactggaggtggggcagaagtcgttgctaggagacagcccatcatcacactgattaatcaattaatttgtatctattaatctgtttatagtaattaatttgtatatgctatatacacatacaaaattaaaactaatttggaattaatttgtatatagtattatacagcatatatagcatatatgtacatatatagactacatgctagttaagtacatagaggatgtgtgtgtatagatatatgttatatgtatgcattcatatatgtacttatttatgctgatgggaataacctggggatcagttttgtctaagatttgggcagaaaaaaatgggtgttggctcagtttctcagaagccagtctttatttctctgttaaccatatgcatgtatctgcctacctcttctccgcagctcttgggcaatgtgctggtgtgtgtgctggcccgcaactttggcaaggaattcaccccacaaatgcaggctgcctatcagaaggtggtggctggtgtggctaatgccctggctcacaagtaccattgagatcctggactgtttcctgataaccataagaagaccctatttccctagattctattttctgaacttgggaacacaatgcctacttcaagggtatggcttctgcctaataaagaatgttcagctcaacttcctgattaatttcacttatttcatttttttgtccaggtgtgtaagaaggttcctgaggctctacagatagggagcacttgtttattttacaaagagtacatgggaaaagagaaaagcaagggaaccgtacaaggcattaatgggtgacacttctacctccaaagagcagaaattatcaagaactcttgatacaaagataatactggcactgcagaggttctagggaagacctcaaccctaagacatagcctcaagggtaatgctacgattaaactccaacaattactgagaaaataatgtgctcaattaaaggcataatgattactcaagacaatgttatgttgtctttcttcctccttcctttgcctgcacattgtagcccataatactataccccatcaagtgttcctgctccaagaaatagcttcctcctcttacttgccccagaacatctctgtaaagaatttcctcttatcttcccatatttcagtcaagattcattgctcacgtattacttgtgacctctcttgaccccagccacaataaacttctctatactacccaaaaaatctttccaaaccctcccccacaccattttttatatttttatatttttcttatttatttcatgcacacacacacactccgtgctttataagcaattctgcctattctctaccttcttacatgcctactgtgcctcatattaaattcatcaatgggcagaaagaaaatatttattcaagaaaacagtgaatgaatgaacgaatgagtaaatgagtaaatgaaggaatgattattccttgctttagaacttctggaattagaggacaatattaataataccatcgcacagtgtttctttgttgttaatgctacaacatacaaagaggaagcatgcagtaaacaaccgaacagttatttcctttctgatcataggagtaatatttttttccttgagcaccatttttgccataggtaaaattagaaggatttttagaactttctcagttgtatacatttttaaaaatctgtattatatgcatgttgattaattttaaacttacttgaatacctaaacagaatctgttgtttccttgtgtttgaaagtgctttcacagtaactctgtctgtactgccagaatatactgacaatgtgttatagttaactgttttgatcacaacattttgaattgactggcagcagaagctcttttatatccatgtgttttccttaagtcattatacatagtaggcactgagaactctttatatctgaataagatatttaggaaccactggtttacatatcagaagcagagctactcagggcattttggggaagatcactttcacattcctgagcatagggaagttctcataagagtaagatattaaaaggagatacttgtgtggtattcgaaagacagtaagagagattgtagaccttatgatcttgatagggaaaacaaactacattcctttctccaaaagtcaaaaaaaaagagcaaatatagcttactataccttctattcctacaccattagaagtagtcagtgagtctaggcaagatgttggccctaaaaatccaaataccagagaattcatgagaacatcacctggatgggacatgtgccgagcacacacaattactatatgctaggcattgctatcttcatattgaagatgaggaggtcaagagatgaaaaaagacttggcaccttgttgttatattaaaattatttgttagagtagagcttttgtaagagtctaggagtgtgggagctaaatgatgatacacatggacacaaaaaatagatcaacagacacccaggcctacttgagggttgagggtgggaagagggagacgatgaaaaagaacctattgggtattaagttcatcactgagtgatgaaataatctgtacatcaagacccagtgatatgcaatttacctatataacttgtacatgtacccccaaatttaaaatgaaagttaaaacaaagtataggaatggaattaattcctcaagatttggctttaattttatttgataatttatcaaatggttgtttttcttttctcactatggcgttgctttataaactatgttcagtatgtctgaatgaaagggtgtgtgtgtgtgtgaaagagagggagagaggaagggaagagaggacgtaataatgtgaatttgagttcatgaaaatttttcaataaaataatttaatgtcaggagaattaagcctaatagtctcctaaatcatccatctcttgagcttcagagcagtcctctgaattaatgcctacatgtttgtaaagggtgttcagactgaagccaagattctacctctaaagagatgcaatctcaaatttatctgaagactgtacctctgctctccataaattgacaccatggcccacttaatgaggttaaaaaaaagctaattctgaatgaaaatctgagcccagtggaggaaatattaatgaacaaggtgcagactgaaatataaatttttctgtaataattatgcatatactttagcaaagttctgtctatgttgactttattgctttttggtaagaaatacaactttttaaagtgaactaaactatcctatttccaaactattttgtgtgtgtgcggtttgtttctatgggttctggttttcttggagcatttttatttcattttaattaattaattctgagagctgctgagttgtgtttactgagagattgtgtatctgcgagagaagtctgtagcaagtagctagactgtgcttgacctaggaacatatacagtagattgctaaaatgtctcacttggggaattttagactaaacagtagagcatgtataaaaatactctagtcaagtgctgcttttgaaacaaatgataaaaccacactcccatagatgagtgtcatgattttcatggaggaagttaatattcatcctctaagtatacccagactagggccattctgatataaaacattaggacttaagaaagattaatagactggagtaaaggaaatggacctctgtctctctcgctgtctcttttttgaggacttgtgtgtgtgtgtgtgtgtgtgtgtgtgtgtgtgttgtggtcagtggggctggaataaaagtagaatagacctgcacctgctgtggcatccattcacagagtagaagcaagctcacaatagtgaagatgtcagtaagcttgaatagtttttcaggaactttgaatgctgatttagatttgaaactgaggctctgaccataaccaaatttgcactatttattgcttcttgaaacttatttgcctggtatgcctgggcttttgatggtcttagtatagcttgcagccttgtccctgcagggtattatgggtaatagaaagaaaagtctgcgttacactctagtcacactaagtaactaccattggaaaagcaacccctgccttgaagccaggatgatggtatctgcagcagttgccaacacaagagaaggatccatagttcatcatttaaaaaagaaaacaaaatagaaaaaggaaaactatttctgagcataagaagttgtagggtaagtctttaagaaggtgacaatttctgccaatcaggatttcaaagctcttgctttgacaattttggtctttcagaatactataaatataacctatattataatttcataaagtctgtgcattttctttgacccaggatatttgcaaaagacatattcaaacttccgcagaacactttatttcacatatacatgcctcttatatcagggatgtgaaacagggtcttgaaaactgtctaaatctaaaacaatgctaatgcaggtttaaatttaataaaataaaatccaaaatctaacagccaagtcaaatctgcatgttttaacatttaaaatattttaaagacgtcttttcccaggattcaacatgtgaaatcttttctcagggatacacgtgtgcctagatcctcattgctttagttttttacagaggaatgaatataaaaagaaaatacttaaattttatccctcttacctctataatcatacataggcataattttttaacctaggctccagatagccatagaagaaccaaacactttctgcgtgtgtgagaataatcagagtgagattttttcacaagtacctgatgagggttgagacaggtagaaaaagtgagagatctctatttatttagcaataatagagaaagcatttaagagaataaagcaatggaaataagaaatttgtaaatttccttctgataactagaaatagaggatccagtttcttttggttaacctaaattttatttcattttattgttttattttattttattttattttattttgtgtaatcgtagtttcagagtgttagagctgaaaggaagaagtaggagaaacatgcaaagtaaaagtataacactttccttactaaaccgacatgggtttccaggtaggggcaggattcaggatgactgacagggcccttagggaacactgagaccctacgctgacctcataaatgcttgctacctttgctgttttaattacatcttttaatagcaggaagcagaactctgcacttcaaaagtttttcctcacctgaggagttaatttagtacaaggggaaaaagtacagggggatgggagaaaggcgatcacgttgggaagctatagagaaagaagagtaaattttagtaaaggaggtttaaacaaacaaaatataaagagaaataggaacttgaatcaaggaaatgattttaaaacgcagtattcttagtggactagaggaaaaaaataatctgagccaagtagaagaccttttcccctcctacccctactttctaagtcacagaggctttttgttcccccagacactcttgcagattagtccaggcagaaacagttagatgtccccagttaacctcctatttgacaccactgattaccccattgatagtcacactttgggttgtaagtgactttttatttatttgtatttttgactgcattaagaggtctctagttttttatctcttgtttcccaaaacctaataagtaactaatgcacagagcacattgatttgtatttattctatttttagacataatttattagcatgcatgagcaaattaagaaaaacaacaacaaatgaatgcatatatatgtatatgtatgtgtgtatatatacacacatatatatatatattttttcttttcttaccagaaggttttaatccaaataaggagaagatatgcttagaaccgaggtagagttttcatccattctgtcctgtaagtattttgcatattctggagacgcaggaagagatccatctacatatcccaaagctgaattatggtagacaaaactcttccacttttagtgcatcaacttcttatttgtgtaataagaaaattgggaaaacgatcttcaatatgcttaccaagctgtgattccaaatattacgtaaatacacttgcaaaggaggatgtttttagtagcaatttgtactgatggtatggggccaagagatatatcttagagggagggctgagggtttgaagtccaactcctaagccagtgccagaagagccaaggacaggtacggctgtcatcacttagacctcaccctgtggagccacaccctagggttggccaatctactcccaggagcagggagggcaggagccagggctgggcataaaagtcagggcagagccatctattgcttacatttgcttctgacacaactgtgttcactagcaacctcaaacagacaccatggtgcatctgactcctgaggagaagtctgccgttactgccctgtggggcaaggtgaacgtggatgaagttggtggtgaggccctgggcaggttggtatcaaggttacaagacaggtttaaggagaccaatagaaactgggcatgtggagacagagaagactcttgggtttctgataggcactgactctctctgcctattggtctattttcccacccttaggctgctggtggtctacccttggacccagaggttctttgagtcctttggggatctgtccactcctgatgctgttatgggcaaccctaaggtgaaggctcatggcaagaaagtgctcggtgcctttagtgatggcctggctcacctggacaacctcaagggcacctttgccacactgagtgagctgcactgtgacaagctgcacgtggatcctgagaacttcagggtgagtctatgggacgcttgatgttttctttccccttcttttctatggttaagttcatgtcataggaaggggataagtaacagggtacagtttagaatgggaaacagacgaatgattgcatcagtgtggaagtctcaggatcgttttagtttcttttatttgctgttcataacaattgttttcttttgtttaattcttgctttctttttttttcttctccgcaatttttactattatacttaatgccttaacattgtgtataacaaaaggaaatatctctgagatacattaagtaacttaaaaaaaaactttacacagtctgcctagtacattactatttggaatatatgtgtgcttatttgcatattcataatctccctactttattttcttttatttttaattgatacataatcattatacatatttatgggttaaagtgtaatgttttaatatgtgtacacatattgaccaaatcagggtaattttgcatttgtaattttaaaaaatgctttcttcttttaatatacttttttgtttatcttatttctaatactttccctaatctctttctttcagggcaataatgatacaatgtatcatgcctctttgcaccattctaaagaataacagtgataatttctgggttaaggcaatagcaatatctctgcatataaatatttctgcatataaattgtaactgatgtaagaggtttcatattgctaatagcagctacaatccagctaccattctgcttttattttatggttgggataaggctggattattctgagtccaagctaggcccttttgctaatcatgttcatacctcttatcttcctcccacagctcctgggcaacgtgctggtctgtgtgctggcccatcactttggcaaagaattcaccccaccagtgcaggctgcctatcagaaagtggtggctggtgtggctaatgccctggcccacaagtatcactaagctcgctttcttgctgtccaatttctattaaaggttcctttgttccctaagtccaactactaaactgggggatattatgaagggccttgagcatctggattctgcctaataaaaaacatttattttcattgcaatgatgtatttaaattatttctgaatattttactaaaaagggaatgtgggaggtcagtgcatttaaaacataaagaaatgaagagctagttcaaaccttgggaaaatacactatatcttaaactccatgaaagaaggtgaggctgcaaacagctaatgcacattggcaacagcccctgatgcatatgccttattcatccctcagaaaaggattcaagtagaggcttgatttggaggttaaagttttgctatgctgtattttacattacttattgttttagctgtcctcatgaatgtcttttcactacccatttgcttatcctgcatctctcagccttgactccactcagttctcttgcttagagataccacctttcccctgaagtgttccttccatgttttacggcgagatggtttctcctcgcctggccactcagccttagttgtctctgttgtcttatagaggtctacttgaagaaggaaaaacaggggtcatggtttgactgtcctgtgagcccttcttccctgcctcccccactcacagtgacccggaatctgcagtgctagtctcccggaactatcactctttcacagtctgctttggaaggactgggcttagtatgaaaagttaggactgagaagaatttgaaaggcggctttttgtagcttgatattcactactgtcttattaccctgtcataggcccaccccaaatggaagtcccattcttcctcaggatgtttaagattagcattcaggaagagatcagaggtctgctggctcccttatcatgtcccttatggtgcttctggctctgcagttattagcatagtgttaccatcaaccaccttaacttcatttttcttattcaatacctaggtaggtagatgctagattctggaaataaaatatgagtctcaagtggtccttgtcctctctcccagtcaaattctgaatctagttggcaagattctgaaatcaaggcatataatcagtaataagtgatgatagaagggtatatagaagaattttattatatgagagggtgaaaccctcaaaatgaaatgaaatcagacccttgtcttacaccataaacaaaaataaatttgaatgggttaaagaattaaactaagacctaaaaccataaaaatttttaaagaaatcaaaagaagaaaattctaatattcacgttgcagccgttttttgaatttgatatgagaagcaaaggcaacaaaaggaaaaataaagaagtgaggctacatcaaactaaaaaatttccacacaaaaaacaaaacaatgaacaaatgaaaggtgaaccatgaaatggcatatttgcaaaccaaatatttcttaaatattttggttaatatccaaaatatataagaaacacagatgattcaataacaaacaaaaaattaaaaataggaaaataaaaaaattaaaaagaagaaaatcctgccatttatggcagaattgatgaacctggaggatgtaaaactaagaaaaataagcctgacacaaaaagacaaatactacacaaccttgctcatatgtgaaacataaaaaagtcactctcatggaaacagacagtagaggtatggtttccaggggttgggggtgggagaatcaggaaactattactcaaagggtataaaatttcagttatgtgggatgaataaattctagatatctaatgtacagcatcgtgactgtagttaattgtactgtaagtatatttaaaatttgcaaagagagtagatttttttttttttttagatggagttttgctcttgttgtccaggctggagtgcaatggcaagatcttggctcactgcaacctccgcctcctgggttcaagcaaatctcctgcctcagcctcccgagtagctgggattacaggcatgcgacaccatgcccagctaattttgtatttttagtagagacggggtttctccatgttggtcaggctgatccgcctgcctcggccacccaaagggctgggattacaggcgtgagccaccgggcctggccgagagtagatcttaaaagcatttaccacaagaaaaaggtaactatgtgagataatgggtatgttaattagcttgattgtggtaatcatttcacaaggtatacatatattaaaacatcatgttgtacaccttaaatatatacaatttttatttgtgaatgatacctcaataaagttgaagaataataaaaaagaatagacatcacatgaattaaaaaactaaaaaataaaaaaatgcatcttgatgattagaattgcattcttgatttttcagatacaaatatccatttgactgtttactcttttccaaaacaatacaataaattttagcactttatcttcattttccccttcccaatctataattatatatatatatattttagatattttgtatagttttactccctagattttctagtgttattattaaatagtgaagaaatgtttacacttatgtacaaaatgttttgcatgcttttcttcatttctaacattctctctaagtttattctatttttttctgattatccttaatattatctctttctgctggaaatacattgttacttttggtttatctaaaaatggcttcattttcttcattctaaaatcatgttaaattaataccactcatgtgtaagtaagatagtggaataaatagaaatccaaaaactaaatctcactaaaatataataatgtgatatataaaaatatagcttttaaatttagcttggaaataaaaaacaaacagtaattgaacaactatactttttgaaaagagtaaagtgaaatgcttaactgcatataccacaatcgattacacaattaggtgtgaaggtaaaattcagtcacgaaaaaactagaataaaaatatgggaagacatgtatataatcttagagataacactgttatttaattatcaacccaaagtagaaactatcaagggagaaataaattcagtcaacaataaaagcatttaagaagttattctaggctgggagcggtggctcacacctgcaattgcagcactttgggaggcctagacaggcggatcacgacgtcaggagttcaagatcagcctggccaacatagtgaaacctcatcgctactaaaaatataaaaacttagcctggcgtggtggcaggcatgtgtaatcccagcaatttgggaggctgaggcaggagaatcgcttgatcctgggaggcagaggttgcagtgagccaagattgtgccactgcattccagcccaggtgacagcatgagactccgtcacaaaaaaaaaagaaaaaaaaaaggggggggggagcggtggagccaagatgaccgaataggaacagctccagtctatagctcccatcgtgagtgacgcagaagacgggtgatttctgcatttccaactgaggtaccaggttcatctcacagggaagtgccaggcagtgggtgcaggacagtaggtgcagtgcactgtgcatgagccaaagcagggcgaggcatcacctcacccgggaagcacaaggggtcagggaattccctttcctagtcaaagaaaagggtgacagatggcacctggaaaatcgggtcactcccgccctaatactgcgctcttccaacaagcttaacaaatggcacaccaggagattatatcccatgcctggctcagagggtcctacgcccatggagcctcgctcattgctagcacagcagtctgaggtcaaactgcaaggtggcagtgaggctgggggaggggtgcccaccattgtccaggcttgagcaggtaaacaaagccgcctggaagctcgaactgggtggagcccaccacagctcaaggaggcctgcctgcctctgtaggctccacctctaggggcagggcacagacaaacaaaagacaacaagaacctctgcagacttaaatgtccctgtctgacagctttgaagagagtagtggttctcccagcacatagcttcagatctgagaacaggcagactgcctcctcaagtgggtccctgacccccgagtagcctaactgggaggcatcccccagtaggggcagactgacacctcacatggctggtactcctctaagacaaaacttccagaggaatgatcaggcagcagcatttgcggttcaccaatatccactgttctgcagccaccgctgttgatacccaggaaaacagcttctggagtggacctccagtaaactccaacagacctgcagctgagggtcctgactgttagaaggaaaactaacaaacagaaaggacatccacaccaaaaacccatctgtacatcgccatcatcaaagaccaaaggtagataaaaccataaagatggggaaaaagcagagcagaaaaactggacactctaaaaatgagagtgcctctcctcctccaaagtaacgcagctcctcaccagcaatggaacaaagctgggcagagaatgactttgacgagttgagagaggaaggcttcagaagatcaaactactccaagctaaaggaggaagttcgaacaaacggcaaagaagtaaaaaactttgaaaaaaaattagatgaatggataactagaataaccaatgcacagaagtccttaaaggacctgatg

SEQ ID NO: 508 - DNA, 25800 bp, Homo sapiens
catcaggtcctttaaggacttctgtgcattggttattctagttatccattcatctaattttttttcaaagttttttacttctttgccgtttgttcgaacttcctcctttagcttggagtagtttgatcttctgaagccttcctctctcaactcgtcaaagtcattctctgcccagctttgttccattgctggtgaggagctgcgttactttggaggaggagaggcactctcatttttagagtgtccagtttttctgctctgctttttccccatctttatggttttatctacctttggtctttgatgatggcgatgtacagatgggtttttggtgtggatgtcctttctgtttgttagttttccttctaacagtcaggaccctcagctgcaggtctgttggagtttactggaggtccactccagaagctgttttcctgggtatcaacagcggtggctgcagaacagtggatattggtgaaccgcaaatgctgctgcctgatcattcctctggaagttttgtcttagaggagtaccagccatgtgaggtgtcagtctgcccctactgggggatgcctcccagttaggctactcgggggtcagggacccacttgaggaggcagtctgcctgttctcagatctgaagctatgtgctgggagaaccactactctcttcaaagctgtcagacagggacatttaagtctgcagaggttcttgttgtcttttgtttgtctgtgccctgcccctagaggtggagcctacagaggcaggcaggcctccttgagctgtggtgggctccacccagttcgagcttccaggcggctttgtttacctgctcaagcctggacaatggtgggcacccctcccccagcctcactgccaccttgcagtttgacctcagactgctgtgctagcaatgagcgaggctccatgggcgtaggaccctctgagccaggcatgggatataatctcctggtgtgccatttgttaagcttgttggaagagcgcagtattagggcgggagtgacccgattttccaggtgccatctgtcacccttttctttgactaggaaagggaattccctgaccccttgtgcttcccgggtgaggtgatgcctcgccctgctttggctcatgcacagtgcactgcacctactgtcctgcacccactgcctggcacttccctgtgagatgaacctggtacctcagttggaaatgcagaaatcacccgtcttctgcgtcactcacgatgggagctatagactggagctgttcctattcggtcatcttggctccaccgctccccccccccttttttttttcttttttttttgtgacggagtctcatgctgtcacctgggctggaatgcagtggcacaatcttggctcactgcaacctctgcctcccaggatcaagcgattctcctgcctcagcctcccaaattgctgggattacacatgcctgccaccacgccaggctaagtttttatatttttagtagcgatgaggtttcactatgttggccaggctgatcttgaactcctgacgtcgtgatccgcctgtctaggcctcccaaagtgctgcaattgcaggtgtgagccaccgctcccagcctagaataacttcttaaatgcttttattgttgactgaatttatttctcccttgatagtttctactttgggttgataattaaataacagtgttatctctaagattatatacatgtcttcccatatttttattctagttttttcgtgactgaattttaccttcacacctaattgtgtaatcgattgtggtatatgcagttaagcatttcactttactcttttcaaaaagtatagttgttcaattactgtttgttttttatttccaagctaaatttaaaagctatatttttatatatcacattattatattttagtgagatttagtttttggatttctatttattccactatcttacttacacatgagtggtattaatttaacatgattttagaatgaagaaaatgaagccatttttagataaaccaaaagtaacaatgtatttccagcagaaagagataatattaaggataatcagaaaaaaatagaataaacttagagagaatgttagaaatgaagaaaagcatgcaaaacattttgtacataagtgtaaacatttcttcactatttaataataacactagaaaatctagggagtaaaactatacaaaatatctaaaatatatatatatataattatagattgggaaggggaaaatgaagataaagtgctaaaatttattgtattgttttggaaaagagtaaacagtcaaatggatatttgtatctgaaaaatcaagaatgcaattctaatcatcaagatgcatttttttattttttagttttttaattcatgtgatgtctattcttttttattattcttcaactttattgaggtatcattcacaaataaaaattgtatatatttaaggtgtacaacatgatgttttaatatatgtataccttgtgaaatgattaccacaatcaagctaattaacatacccattatctcacatagttacctttttcttgtggtaaatgcttttaagatctactctcggccaggcccggtggctcacgcctgtaatcccagccctttgggtggccgaggcaggcggatcagcctgaccaacatggagaaaccccgtctctactaaaaatacaaaattagctgggcatggtgtcgcatgcctgtaatcccagctactcgggaggctgaggcaggagatttgcttgaacccaggaggcggaggttgcagtgagccaagatcttgccattgcactccagcctggacaacaagagcaaaactccatctaaaaaaaaaaaaaaatctactctctttgcaaattttaaatatacttacagtacaattaactacagtcacgatgctgtacattagatatctagaatttattcatcccacataactgaaattttataccctttgagtaatagtttcctgattctcccacccccaacccctggaaaccatacctctactgtctgtttccatgagagtgacttttttatgtttcacatatgagcaaggttgtgtagtatttgtctttttgtgtcaggcttatttttcttagttttacatcctccaggttcatcaattctgccataaatggcaggattttcttctttttaatttttttattttcctatttttaattttttgtttgttattgaatcatctgtgtttcttatatattttggatattaaccaaaatatttaagaaatatttggtttgcaaatatgccatttcatggttcacctttcatttgttcattgttttgttttttgtgtggaaattttttagtttgatgtagcctcacttctttatttttccttttgttgcctttgcttctcatatcaaattcaaaaaacggctgcaacgtgaatattagaattttcttcttttgatttctttaaaaatttttatggttttaggtcttagtttaattctttaacccattcaaatttatttttgtttatggtgtaagacaagggtctgatttcatttcattttgagggtttcaccctctcatataataaaattcttctatatacccttctatcatcacttattactgattatatgccttgatttcagaatcttgccaactagattcagaatttgactgggagagaggacaaggaccacttgagactcatattttatttccagaatctagcatctacctacctaggtattgaataagaaaaatgaagttaaggtggttgatggtaacactatgctaataactgcagagccagaagcaccataagggacatgataagggagccagcagacctctgatctcttcctgaatgctaatcttaaacatcctgaggaagaatgggacttccatttggggtgggcctatgacagggtaataagacagtagtgaatatcaagctacaaaaagccgcctttcaaattcttctcagtcctaacttttcatactaagcccagtccttccaaagcagactgtgaaagagtgatagttccgggagactagcactgcagattccgggtcactgtgagtgggggaggcagggaagaagggctcacaggacagtcaaaccatgacccctgtttttccttcttcaagtagacctctataagacaacagagacaactaaggctgagtggccaggcgaggagaaaccatctcgccgtaaaacatggaaggaacacttcaggggaaaggtggtatctctaagcaagagaactgagtggagtcaaggctgagagatgcaggataagcaaatgggtagtgaaaagacattcatgaggacagctaaaacaataagtaatgtaaaatacagcatagcaaaactttaacctccaaatcaagcctctacttgaatccttttctgagggatgaataaggcatatgcatcaggggctgttgccaatgtgcattagctgtttgcagcctcaccttctttcatggagtttaagatatagtgtattttcccaaggtttgaactagctcttcatttctttatgttttaaatgcactgacctcccacattccctttttagtaaaatattcagaaataatttaaatacatcattgcaatgaaaataaatgttttttattaggcagaatccagatgctcaaggcccttcataatatcccccagtttagtagttggacttagggaacaaaggaacctttaatagaaattggacagcaagaaagcgagcttagtgatacttgtgggccagggcattagccacaccagccaccactttctgataggcagcctgcactggtggggtgaattctttgccaaagtgatgggccagcacacagaccagcacgttgcccaggagctgtgggaggaagataagaggtatgaacatgattagcaaaagggcctagcttggactcagaataatccagccttatcccaaccataaaataaaagcagaatggtagctggattgtagctgctattagcaatatgaaacctcttacatcagttacaatttatatgcagaaatatttatatgcagagatattgctattgccttaacccagaaattatcactgttattctttagaatggtgcaaagaggcatgatacattgtatcattattgccctgaaagaaagagattagggaaagtattagaaataagataaacaaaaaagtatattaaaagaagaaagcattttttaaaattacaaatgcaaaattaccctgatttggtcaatatgtgtacacatattaaaacattacactttaacccataaatatgtataatgattatgtatcaattaaaaataaaagaaaataaagtagggagattatgaatatgcaaataagcacacatatattccaaatagtaatgtactaggcagactgtgtaaagtttttttttaagttacttaatgtatctcagagatatttccttttgttatacacaatgttaaggcattaagtataatagtaaaaattgcggagaagaaaaaaaaagaaagcaagaattaaacaaaagaaaacaattgttatgaacagcaaataaaagaaactaaaacgatcctgagacttccacactgatgcaatcattcgtctgtttcccattctaaactgtaccctgttacttatccccttcctatgacatgaacttaaccatagaaaagaaggggaaagaaaacatcaagcgtcccatagactcaccctgaagttctcaggatccacgtgcagcttgtcacagtgcagctcactcagtgtggcaaaggtgcccttgaggttgtccaggtgagccaggccatcactaaaggcaccgagcactttcttgccatgagccttcaccttagggttgcccataacagcatcaggagtggacagatccccaaaggactcaaagaacctctgggtccaagggtagaccaccagcagcctaagggtgggaaaatagaccaataggcagagagagtcagtgcctatcagaaacccaagagtcttctctgtctccacatgcccagtttctattggtctccttaaacctgtcttgtaaccttgataccaacctgcccagggcctcaccaccaacttcatccacgttcaccttgccccacagggcagtaacggcagacttctcctcaggagtcagatgcaccatggtgtctgtttgaggttgctagtgaacacagttgtgtcagaagcaaatgtaagcaatagatggctctgccctgacttttatgcccagccctggctcctgccctccctgctcctgggagtagattggccaaccctagggtgtggctccacagggtgaggtctaagtgatgacagccgtacctgtccttggctcttctggcactggcttaggagttggacttcaaaccctcagccctccctctaagatatatctcttggccccataccatcagtacaaattgctactaaaaacatcctcctttgcaagtgtatttacgtaatatttggaatcacagcttggtaagcatattgaagatcgttttcccaattttcttattacacaaataagaagttgatgcactaaaagtggaagagttttgtctaccataattcagctttgggatatgtagatggatctcttcctgcgtctccagaatatgcaaaatacttacaggacagaatggatgaaaactctacctcggttctaagcatatcttctccttatttggattaaaaccttctggtaagaaaagaaaaaatatatatatatatgtgtgtatatatacacacatacatatacatatatatgcattcatttgttgttgtttttcttaatttgctcatgcatgctaataaattatgtctaaaaatagaataaatacaaatcaatgtgctctgtgcattagttacttattaggttttgggaaacaagagataaaaaactagagacctcttaatgcagtcaaaaatacaaataaataaaaagtcacttacaacccaaagtgtgactatcaatggggtaatcagtggtgtcaaataggaggttaactggggacatctaactgtttctgcctggactaatctgcaagagtgtctgggggaacaaaaagcctctgtgacttagaaagtaggggtaggaggggaaaaggtcttctacttggctcagattatttttttcctctagtccactaagaatactgcgttttaaaatcatttccttgattcaagttcctatttctctttatattttgtttgtttaaacctcctttactaaaatttactcttctttctctatagcttcccaacgtgatcgcctttctcccatccccctgtactttttccccttgtactaaattaactcctcaggtgaggaaaaacttttgaagtgcagagttctgcttcctgctattaaaagatgtaattaaaacagcaaaggtagcaagcatttatgaggtcagcgtagggtctcagtgttccctaagggccctgtcagtcatcctgaatcctgcccctacctggaaacccatgtcggtttagtaaggaaagtgttatacttttactttgcatgtttctcctacttcttcctttcagctctaacactctgaaactacgattacacaaaataaaataaaataaaataaaataaaacaataaaatgaaataaaatttaggttaaccaaaagaaactggatcctctatttctagttatcagaaggaaatttacaaatttcttatttccattgctttattctcttaaatgctttctctattattgctaaataaatagagatctctcactttttctacctgtctcaaccctcatcaggtacttgtgaaaaaatctcactctgattattctcacacacgcagaaagtgtttggttcttctatggctatctggagcctaggttaaaaaattatgcctatgtatgattatagaggtaagagggataaaatttaagtattttctttttatattcattcctctgtaaaaaactaaagcaatgaggatctaggcacacgtgtatccctgagaaaagatttcacatgttgaatcctgggaaaagacgtctttaaaatattttaaatgttaaaacatgcagatttgacttggctgttagattttggattttattttattaaatttaaacctgcattagcattgttttagatttagacagttttcaagaccctgtttcacatccctgatataagaggcatgtatatgtgaaataaagtgttctgcggaagtttgaatatgtcttttgcaaatatcctgggtcaaagaaaatgcacagactttatgaaattataatataggttatatttatagtattctgaaagaccaaaattgtcaaagcaagagctttgaaatcctgattggcagaaattgtcaccttcttaaagacttaccctacaacttcttatgctcagaaatagttttcctttttctattttgttttcttttttaaatgatgaactatggatccttctcttgtgttggcaactgctgcagataccatcatcctggcttcaaggcaggggttgcttttccaatggtagttacttagtgtgactagagtgtaacgcagacttttctttctattacccataataccctgcagggacaaggctgcaagctatactaagaccatcaaaagcccaggcataccaggcaaataagtttcaagaagcaataaatagtgcaaatttggttatggtcagagcctcagtttcaaatctaaatcagcattcaaagttcctgaaaaactattcaagcttactgacatcttcactattgtgagcttgcttctactctgtgaatggatgccacagcaggtgcaggtctattctacttttattccagccccactgaccacaacacacacacacacacacacacacacacacacacaagtcctcaaaaaagagacagcgagagagacagaggtccatttcctttactccagtctattaatctttcttaagtcctaatgttttatatcagaatggccctagtctgggtatacttagaggatgaatattaacttcctccatgaaaatcatgacactcatctatgggagtgtggttttatcatttgtttcaaaagcagcacttgactagagtatttttatacatgctctactgtttagtctaaaattccccaagtgagacattttagcaatctactgtatatgttcctaggtcaagcacagtctagctacttgctacagacttctctcgcagatacacaatctctcagtaaacacaactcagcagctctcagaattaattaattaaaatgaaataaaaatgctccaagaaaaccagaacccatagaaacaaaccgcacacacacaaaatagtttggaaataggatagtttagttcactttaaaaagttgtatttcttaccaaaaagcaataaagtcaacatagacagaactttgctaaagtatatgcataattattacagaaaaatttatatttcagtctgcaccttgttcattaatatttcctccactgggctcagattttcattcagaattagcttttttttaacctcattaagtgggccatggtgtcaatttatggagagcagaggtacagtcttcagataaatttgagattgcatctctttagaggtagaatcttggcttcagtctgaacaccctttacaaacatgtaggcattaattcagaggactgctctgaagctcaagagatggatgatttaggagactattaggcttaattctcctgacattaaattattttattgaaaaattttcatgaactcaaattcacattattacgtcctctcttcccttcctctctccctctctttcacacacacacacaccctttcattcagacatactgaacatagtttataaagcaacgccatagtgagaaaagaaaaacaaccatttgataaattatcaaataaaattaaagccaaatcttgaggaattaattccattcctatactttgttttaactttcattttaaatttgggggtacatgtacaagttatataggtaaattgcatatcactgggtcttgatgtacagattatttcatcactcagtgatgaacttaatacccaataggttctttttcatcgtctccctcttcccaccctcaaccctcaagtaggcctgggtgtctgttgatctattttttgtgtccatgtgtatcatcatttagctcccacactcctagactcttacaaaagctctactctaacaaataattttaatataacaacaaggtgccaagtcttttttcatctcttgacctcctcatcttcaatatgaagatagcaatgcctagcatatagtaattgtgtgtgctcggcacatgtcccatccaggtgatgttctcatgaattctctggtatttggatttttagggccaacatcttgcctagactcactgactacttctaatggtgtaggaatagaaggtatagtaagctatatttgctctttttttttgacttttggagaaaggaatgtagtttgttttccctatcaagatcataaggtctacaatctctcttactgtctttcgaataccacacaagtatctccttttaatatcttactcttatgagaacttccctatgctcaggaatgtgaaagtgatcttccccaaaatgccctgagtagctctgcttctgatatgtaaaccagtggttcctaaatatcttattcagatataaagagttctcagtgcctactatgtataatgacttaaggaaaacacatggatataaaagagcttctgctgccagtcaattcaaaatgttgtgatcaaaacagttaactataacacattgtcagtatattctggcagtacagacagagttactgtgaaagcactttcaaacacaaggaaacaacagattctgtttaggtattcaagtaagtttaaaattaatcaacatgcatataatacagatttttaaaaatgtatacaactgagaaagttctaaaaatccttctaattttacctatggcaaaaatggtgctcaaggaaaaaaatattactcctatgatcagaaaggaaataactgttcggttgtttactgcatgcttcctctttgtatgttgtagcattaacaacaaagaaacactgtgcgatggtattattaatattgtcctctaattccagaagttctaaagcaaggaataatcattccttcatttactcatttactcattcgttcattcattcactgttttcttgaataaatattttctttctgcccattgatgaatttaatatgaggcacagtaggcatgtaagaaggtagagaataggcagaattgcttataaagcacggagtgtgtgtgtgtgcatgaaataaataagaaaaatataaaaatataaaaaatggtgtgggggagggtttggaaagattttttgggtagtatagagaagtttattgtggctggggtcaagagaggtcacaagtaatacgtgagcaatgaatcttgactgaaatatgggaagataagaggaaattctttacagagatgttctggggcaagtaagaggaggaagctatttcttggagcaggaacacttgatggggtatagtattatgggctacaatgtgcaggcaaaggaaggaggaagaaagacaacataacattgtcttgagtaatcattatgcctttaattgagcacattattttctcagtaattgttggagtttaatcgtagcattacccttgaggctatgtcttagggttgaggtcttccctagaacctctgcagtgccagtattatctttgtatcaagagttcttgataatttctgctctttggaggtagaagtgtcacccattaatgccttgtacggttcccttgcttttctcttttcccatgtactctttgtaaaataaacaagtgctccctatctgtagagcctcaggaaccttcttacacacctggacaaaaaaatgaaataagtgaaattaatcaggaagttgagctgaacattctttattaggcagaagccatacccttgaagtaggcattgtgttcccaagttcagaaaatagaatctagggaaatagggtcttcttatggttatcaggaaacagtccaggatctcaatggtacttgtgagccagggcattagccacaccagccaccaccttctgataggcagcctgcatttgtggggtgaattccttgccaaagttgcgggccagcacacacaccagcacattgcccaagagctgcggagaagaggtaggcagatacatgcatatggttaacagagaaataaagactggcttctgagaaactgagccaacacccatttttttctgcccaaatcttagacaaaactgatccccaggttattcccatcagcataaataagtacatatatgaatgcatacatataacatatatctatacacacacatcctctatgtacttaactagcatgtagtctatatatgtacatatatgctatatatgctgtataatactatatacaaattaattccaaattagttttaattttgtatgtgtatatagcatatacaaattaattactataaacagattaatagatacaaattaattgattaatcagtgtgatgatgggctgtctcctagcaacgacttctgccccacctccagtgtaactgcctagtctttcataatcaaatattcactttcctttccattccatttactacagaatttataaaattccaattattccttattgtaaaatgatttatagcctctaaaacagtattctatgcctctcatctttgagttggagcctctcccatacccatgtggagagacaaaaggattattctaagtgcagaattagcaggtgagagctggtatgcataatttgagttgttgttagagaaggaaaaatgaagggagggggttgggagagaaagacaggatattaaataatttaaaatagcaagattgtgaggaaggaaaaaatgcagaatatttaaataaaaaattaacaaaattttagaagcattaaatgataaaatatagtaaaatgacaaaaatgtgggagaagagcaggtaggtaaaagaaccaaaatgtaagattagaaagtaaaaagagaaaagtgaagcatctcctggactcaccctgaagttctcaggatccacgtgcagcttgtcacagtgcagctcactcagctgagaaaaagtgcccttgaggttgtccaggtgagccaggccatcactaaaggcacctagcaccttcttgccatgagccttcaccttagggttgcccataacagcatcaggagaggacagatccccaaaggactcaaagaacctctgggtccaagggtagaccaccagtaatctgagggtaggaaaacagcccaagggacagagagtcagtgcctatcagaaacccaagagtcttctctgtctacacatgcccagtttccatttgcctccttgagcctctcttataaccttgataccaacctgcccagggcctcaccaccaactgcatccacgttcactttgccccacagggcattgacagcagtcttctcctcaggagtcagatgcaccatggtgtctgtttgaggttgctagtgaacactgttatgtcagaagaaagtgtaagcaacagtcgactctgccctgccttttatgctggtcctgtcctccctgctccagtgagcaggttggtttaagataagcagggtttcattagtttgtgagaatgaaaaatgaaccttcattccactattcccttaacttgccctgagattggctgttctgtcatgtgtgtcttgactcagaaaccctgttctcctctacatatctccccaccgcatctctttcagcagttgtttctaaaaatatcctcctagtttcatttttgcagaagtgttttaggctaatatagtggaatgtatcttagagtttaacttatttgtttctgtcactttatactaagaaaacttatctaaaagcagatgttttaacaagttgactcaatataaagttcttctttgcctctagagatttttgtctccaagggaattttgagaggttggaatggacaaatctattgctgcagtttaaacttgcttgcttcctccttcttttggtaaattcttcctataataaaactctaattttttattatattgaaataaatatccattaaaagaatatttaaaaaatgaatagtgtttatttaccagttattgaaataggttctggaaacatgaattttaaggttaacattttaatgacagataaaatcaaatattatatacaaatattttgaatgtttaaaattatggtatgactaaagaaagaatgcaaagtgaaaagtagatttaccatattcagccagattaaatttaacgaagttcctgggaatatgctagtacagaacatttttacagatgtgttcttaaaaaaaaatgtggaattagacccaggaatgaagatcccagtagtttttcactcttttctgaattcaaataatgccacaatggcagacaaatacacacccatgagcatatccaaaaggaaggattgaaggaaagaggaggaagaaatggagaaaggaaggaaggaagaggggaagagagaggatggaagggatggaggagaagaaggaaaaataaataatggagaggagaggagaaaaaaggaggggagaggagaggagaagggatagggaagagaaagagaaagggaagggaagagaggaaagaagagaagaggagagaaaagaaacgaagagaggggaagggaaggaaaaaaaagaggaaaaaagagacaagagaagagataagactgacagttcaaattttggtggtgatatggatcaatagaaactcaaactctgttggtgacactgtacaatagtataacccctttggaaaacctttaatagtatccacaaatgctggatgcttgataagtctattacctagcaattacatttttagatattcagaaacacatgcatgtgtgtatccaaagacatgtatagaaatgcttatgacagcaataatcataaaaacctcaaaccggtagccacttaaatgcttaccaacagtagaattgataaattacggtatagtcaaagaatagaatattacacagaaatgaaaagaatcaactactgcttaacacgtagcgatacaaatgcattttacagcatttggttgattaaaagtaaccagaggtgagttcaaactatatgactttatttgtatatagaaagatggatgatgtgcctgagattctgatcacaaggggaaatgttataaaatagggtagagaggagccatgaatgacctttaaactttgttacaagttatttttctgtaacctggaagccaacgaaagatattgaataattcaagaaaggtggtggcatggtttgatttgtgtctttaaaagattattctcacttagtgaagaaatgtattttagaagtagagaaaatgggagacaaatagctgggcttctgttgcagtagggaagaaagtgacaatgccatttctattatcagacttggaccatgacggtgatgtcagtcgtgaacacaagaatagggccacatttgtgagtttagtggtacgataaaatcagaaatacagtcttggatacattgtattgtatgcactcttgtaaaatgcaaaaagatgtacttagatatgtggatctggagctcagaaagaatacaaccaggtcaagaatacagaatggaacagaacatacaagaacagatcataatgtgctgtgtgaatcactaccactacctgttaaaaatgacagatgatgtacttcatcaatatctccttaaaatcttagaatgtgtttgtgagggaggaattatgtttccaattcatatataagaaaattgattctaaaaaaaatgttaggtaaattcttaaggccatgaggactgttatttgatctttgtctgttaattccaaagacttggcttttcactttaattctgttctacctgaaatgattttacacattgggagatctggttacatgtttattctatatggattgcattgagaggatttgtataacagaataaggtctttttttcttttctcttctgagatggagtttcatccctattgcccaagctagagtgcaatggtgcaatctaggctcaccgcaacctctgcctcctgggttcaagcaattctcctgcctcagccacctgaatagctgggactgcaggcatgcaccacacgcccggctgattttgtatttttagtagagatggggtttcaccatgttggtcaggctggtcttgaactcctgacctcaagtgatctgcctgccttggcctcccaaagtgctgggtttacaagcctgagccaccgcatccagccaggataaggtctaaaagtggaaagaatagcatctactcttgttcaggaaacaatgaggacctgactgggcagtaagagtggtgattaatagatagggacaaattgaagcagaatcgaactgttgattagaggtagggaaatgattttaatctgtgaccttggtgaatgggcaagtagctatctaatgactaaaatggaaaacactggaagagaaacagttttagtataacaagtgaaatacccatgctgagtctgaggtgcctataggacatctatataaataagcccagtacattgtttgatatatgggtttggcactgaggttggaggtcagaggttagaaatcagagttgggaattgggattatacaggctgtatttaagagtttagatataactgtgaatccaagagtgtgatgaatacaaagttaaatgaaggacctttaatgaacaccaacatttaatgtgaaatctcaaggaagtatgaagtaagacatagtccccaaaatccccgatgattttagaactcagtatcgattttaattagtgtaatgccaatgtgggttagaatggaagtcaacttgctgttggtttcagagcaggtaggagataaggttctagattttgacacagtgaaaagctgaaacaaaaaggaaaaggtagggtgaaagatgggaaatgtatgtaaggaggatgagccacatggtatgggaggtatactaaggactctagggtcagagaaatatgggttatatccttctacaaaattcacattcttggctgggtgtggtggctcacgcctgtgatcccagcactttcagaggccgaggagggtggatcacctgatgttaggagttcgagatcagcctgaccaacatggtgaaaccccctatctactaaaaatagaaaattagccaggcatggtggtggcacatgcctgtagtgccagctacttgggaggctgaggcaggagaatcgcttgaacctgggaggcagatgttgcagtgagcctggatcatgccattgcactccagcctgggcaaccatagcaatgctctatctcagaaaaaaaaaaaaaaagttcttgctaacctgaaaaaataaattatttgagctttgtacctaattcataattttcagataatgaatattgagatgatatatgcacagaacaatgcctagagacacattctaagtgtgacattcttaaatgccagtgctctccacaattctaatctcagttcactgctgtttgaattctgtgttttcatattatcttatcaatacattaatcattgcaataatcactgcacactgtaattattcatttactggacacatcctagtttccttctgtcaattaccattcatgtctgctttcacatttatttctcatccttccctcagtgttctctgtatttgaggaactgacatttcccaggtttcctcaccctttcagtcgcatgtacattctgcaatggtaaacactggctgagggaaagcataagcaagattatttctggtctctctctctctctgaacggatctcctacagcagacagtcttttttatggttttttatggctgatactttgatgcccccattagacagttctggctctctccaaggagcacccactagctcactgaatccagtggacctctggttatgggctctggttctggactctggtggtataaacattttctccttctgcccttctaggcctaatggcggaagaggttttctgatgttactaacatctagatttctgcactgtcctttatttgatattttagctcttccaatacaaggataattaactattaagagctgtatttaattctaggttgagtaactgataatggtttgtcctttccttgatggaccctaactgatataactaataaactgacttctgatactatgtcttattagtgtatgaaattctgatgtgaataaatgcatgacacatgcttgttgactaatcaaactatagcagaggcagaggaaggaacctcatgacctataaatactaagatatcacatagtcattttagaaccaaaggttcctcagtttaggtctcaaacaaacttctctatggatagtgtaatactcataatgtagaaaagagagatctaattttggataatttaatcttttttttcatctccaaatactagggaaataagagtttacaagacaatgtctctaccataaaagaggttaaaatttagtggtaggaatatacaatgagcagattaagtacattagtaggaaaaacactaaatattataagaaagagcccataattgtagcagagtttatagacagggctttaagcccagttaaaattaaaaaaaaatagcttcttagttgagataacatataagttaggacttaaagtatgagtacaagatagacaaggcaaaatgagggaaagacatcacccagagtaaatgaacagcatgtacaaagctaacagagtcaaatgcagaaatccaaattctctagattgactggggtaattttgtcaatgcactcaagtatgcatctgtaacagtgtgtgttcttatgtgtgcatggaatgtttgttcatggagcataagaaattgtgtagacatatagacacatctgtatgtgtatatcagagaatgtttacattgctacaagattttatatgactacatgcacaagcattcatgctacatgtcagtttggtatatttttcctgtaagatgtgtacttatgtgttttccactaaaggtgaatgtgaaaactcctcatcgagaaatgaacaataagtaacacaggaaattcaaccctcatctcttcatttaaaatacagagtgacattcagaagggcaagggatagcacaagtgtgagattttaaagtgtgattgtttggacacagtaattattcaaagaatgtgcttaattaatgtatgctacaagacagcagttgagtgattattgtacatgagcaactggtatttattctgctttgtgggttattagtggggactcaaaaatatgacaaaggaatttcagaagctgttagatggtagcaccgcctatctatgtgctcccactcaagagatatggtgaggtgagctctttggggtggacacatagaggaaatactttgagaaagaggttttgggattaatgaaactggagaagaaagggtattatatcttctaaaacctctttctttgaggttttaggtttgagggtgctacatacttcctaagggtcttgggtacaggagtttgaagtgattgccacagaatggctacgttcattgccagatccaaacagggggcttgtaggcatttgctgttctgtcaataaatttccttcttttcattcacagacagggattttagctgtcatctctgactctctgtttcacaatgttttccagttctgtgcaatcactgccacaatggtctcttactcgattttttttcttaacttcattgtttccatcaacttcagttctttatccatcacctcaatataattacagcaagctcctctgactatacccaagttagactttgtctaatcagttctatatatatatatacatgtgaatcaattttctacgtttccctatttattatgtcactctcatatgcaagaaacttcagtgatttttgctcaaaacgatagctatttttcttacttcatctggtctctgcatccagtttccctaattttatatcatcctgcctcttttaaatgtccatattctcctctatcaacttgacttaacgtgctgtttcctaaatctcagccttttaatctgctgtttgctcacataaacaaaaatcagtggttttcaatattgattgctaataattttttattcataaaaattgtatatatttatgaatgcacacatgtgtgtgtatatatatagaaagagaataaaatcactaccactaaaaacaataaaacttgtacatatttatagaaacagagagctgaacaaagagatttattatttattgggtagtgtgataaagactttacaggtatcaattcaattagttcttacaaaaatcctttaaggaaaatacatatgataaatctatcatatgcacagcttaatggaattataaatatgtttcaggtcacagaggtagcagatgaagtacagatgaaaaccaagacagccagttcacatgccttagagataattctctattaataccattgaagacgttaagagaaagttcaaggtttggcccttgattggtctctaggaagccccatccccacttcattataaataataaaaaatatgttgtttaaaataagtagaagtgaactgcagtcaccaaatgagctatatcctgagtttcatacaaataatagcctatacagaacttctaatttgagtcctaacatacctctacacactaccaacaatcctcttacacctccaaagagtacctccattgacctccctttctgtaaaaacattgtcttattctagagacgatttccccttcctaggagtaactaccccactaaatccacccacgagttctctcttttcttgcaggattgcaagaaagtatcttctctgtccttaaactcccattctccaacattctcatttccatcagaaatagtgcgtccttttggctgaatcagggtaaaatataaagacagaaaaagagtacaatgatatttcttagagagcatatttctttattctatttttatcatgcaggaactgaatcagcaggcaggatactgctcttctccccaacctcccccatctaaaggagatgagattttgggacataggtacaaacatagtggaccataggtacaaacatagtggacagggaactcagtggtcttgtgggctacagcattaaccacagcatttgttagttactgccaagaagcctgtatctgtagggtaaaatcctcgctgaagtgggttgccaaaacaatcaatatcacgttgcctaagagctggggagggagtgaagataaaaaagaaaatggtacatagtgaatagaaggcctcaagctggacttgcagtaaatagatataacacttacatcctttttcaccagagtttgagcaactctcaccattatgggctagatatcagcttcaatatgactggcagccctgcacctcccattgtgtcctatccttctcttacttgctatgccaactcactaccccaacatattgtgattgtttcattttttttttagagacttcgtccttttaaaaagtaggataatagtacttcaaggaacagtaatggataggataagtccccagtcatcacatacatacatacatacatacatacaattttcccaaacactcataacaaagaatcctgtaccatgcgtacaaaagtataccatcatcattcggagggaaacaatcctctttttaacagcttcccactactttgttcagttgatctttttctaacctccaggactatgcagaaaagtgactattaatttttatagaaaatttcgctgaccaaaggaaagatgttattttctctatctcaacttctgttccctcatccaaaaacactcagtttgattttggccagaattttttataagatgtgtttttcagagctatcaaatggtaagtggccttccattattcatagtccttgctctaccaaattttagttatgttatttacagcaacataactctcaaaatcccactgctgaaatatcatatcccatagctgactcataacacaagagaaagccacctctgctttcaaaagtacccatagtgcaaatatctaagggtaaagaagaaagcgtgagtgtacttactactcaccaggaagttctcagggtccacgtgcagcttgttacagtgcaggtcactcagtgtagcaaaggtgcctttgaggtcatccgtgagcataacagcttttccgaaggagatcagcaccttcttgccatgtgccttgactttggggttgcccattattgcacagtcagagcccagatatccaaaactttcaaagtacctctaggtccatgggtagacaaccaggagactgtgggatagtcataatcacagagcaggtgcaaagtcagactatgtaagacaacgggctaatccctctttcagaaacactttctgcctttctgcaccttgtcccggcttccagtacctacctgcccagaatctcacctccagccttctcaccttaaccttgcttcacaggctggtggcagcagccttcttgtcagcagtgaaatgcactacagtgtcagatctgggagtttcctggtgatcacagatgagccagaagcatgcctgcattgctgcttcatgtgtggctttttacttctcctctctggcccccagccctttgcctctcccagtgaaatgaatctattgaccagccctttgcctccctcagtaaaatgaatctattggtcaagggtgggttgtgactccaggggtggggtttgggcaaggaagttttgcaagatggacattcgagtttctgatagaatccaggtggccttctcaggggaactttgctgttcaggcttaatttgaaactttacttccttcccctccattttcctacactacccccaccatccagtgtgcagtttatttctcaaggacttcgccagcagccgctaataacctgaatgctgacaaataggaataagttacaactgaaaaggataagaattacgaatatcttagccatcaattcctggatcaggagttgtgacaatgtaacaacgtgttatcctgttattcatccaggctttatgtggaagaagccacagcctttcttggttttcaattctcttgagactacattgaatacacaatttcatcagtttttttttctttctttctttctttttcttttttttttttttttttttgagatggagtctcgctttgtcacccaggctggagtgtgcagtggcgcgatctctgctcaccgcaagctctgcctcccaggttcacgccattctcctgcctcagcctcccgagtagctgggactacaggcacccgccactgtctctggctaattttttgtatttttagtagagatggggtttcaccatgttagccaggatggtcttgatctcctgacctcgtgatccgcccacctcagcctcccaaagtgctgggattacaggtgtgagccaccgcgcccggccaatttcatcactttttagaatagaaataaacacctctatccagcatcaacttggaagaaagcagaataagaaacaaactagggaagtaaggggaaaactgggttttattactgtgttttttaatccatttagtagtcagtgtacttatctgaacaaaggagatttcctctgaatcattgaacaatagtccatgtcaaatcctacatatctacaaaattatgccagaacatctaatagtgttgggggagaagtgtgctgctctgttcaagcaagaggataggagattccgtggcccgtgctgggcattaggtcatttgtgtctggcacaggcttgatctatagtctaatgctgtgtttaacttgtctttatatctaatcaggcaaagacattcttcactgacaatattccacaggctgctgcacgtgtctcatgtgctgcacgtctcatgcgtctcaaacaagcaatttcaggaatagacagggcacacttccaccggcagagagaagaacagtttattttatattcttaaggcttactgtcctcatacttagaggttcaggatgctggtttgtgtgttacccctgagataaatccttacaagaaataaagtttaggaaatcacccccatgtgtatttcaaggagactctaaatttcaaagagttaaacccaatatattaaagctgaatttctgatattagagacacaatattttagtctacttgatatagttgagaggcagttacctgttttacttaggaacatggggaaagtttgtagtgacaaacagtttgaggcaaaaccaagattatctttaagagcagagatcgatgatatgaagaaaaagaagtggcaactttgactatatgcaggaaacacatttatattgagttgtggggactggcctcagaggaaacttcaggtcatgtcctttaatggccctaaaactcattcccaaaagaatttctgttcattgccatacctcatatccttaggtacatacatctaaaaccctgcgtaccagtgaacagctgccccatctttccatcagccaaccaggaattcagcagttactgctaacttccacttttctctcacccgctccaggaaaagtgacctgcagtcactttcctggaagtattgattctttcttgtttgtggctgttccccatttccaattgttttccatgattattgcttctactgtgatctatagactcttatatcatcaataccaggttatcattgcagttgtcaacttctctctgttgcatcttatgcattaattcaacaaatacatattagattccatatgtcatccatgaagtttcattcatatgccatccatttttcttaattctgagaatcttacatgaactagacagacagattctctggctaatggtgccctcactatagtgagcagaggagaccagcatacatactaaaagaaatgaattaataagagatttcagatggtattatatgacttgaagaaactgcatattgtacctacaaccatctggtcttttagaaacctgacaaaagcaagcaatggggaaaggattttcaatttaataaatgatgggggagaactggctagccatatgctgaaaaatgaaactggactccttccttataccttatccaaaattaactccagatggattagagacttaaatgaaaaaccccaaactataaaaagcctagaaaaaaatcaaggcaatactattcatgatataaacacgggcacagatttcatgatgaaagcgtgaaaagcaattgcagcaaaagcaaaaattgaccaatggaatctaattaaactaaagagctcctgctcagcaaaagaaactaccatcagagcgaaagacaatctacagaatgggaaaaagattttccaatctattcttctgacaaaggcctaatatccagagtaaacaagaaacttaaacaactttacaagaaaaaaaaaacccattaaaaccatggcacacttttacctataaaacaaacctgcatatcctgtacgtgtacccctgaatttaaggtaacagtaaattaaattaaaagaaaaatgccatggcaatgtcagaaagttaccctatatggcctaaaaagagaaggcataaataatccaaaacttgtttaacatatcatcaaga

SEQ ID NO: 509 - DNA, 25794 bp, Homo sapiens
tccgaataactgtacctccaattattctttaaggtagcatgcaactgtaatagttgcatgtatatatttatcataatactgtaacagaaaacacttactgaatatatactgtgtccctagttctttacacaataaactaatctcatcctcataattctattagctaatacatattatcatcctatatttcagagacttcaagaagttaagcaacttgctcaagatcatctaagaagtaggtggtatttctgggctcatttggcccctcctaatctctcatggcaacatggctgcctaaagtgttgattgccttaattcatcagggatgggctcatactcactgcagaccttaactggcatcctcttttcttatgtgatctgcctgaccctagtagacttatgaaatttctgatgagaaaggagagaggagaaaggcagagctgactgtgatgagtgatgaaggtgccttctcatctgggtaccagtggggcctctaagactaagtcactctgtctcactgtgtcttagccagttccttacagcttgccctgatgggagatagagaatgggtatcctccaacaaaaaaataaattttcatttctcaaggtccaacttatgttttcttaatttttaaaaaaatcttgaccattctccactctctaaaataatccacagtgagagaaacattcttttcccccatcccataaatacctctattaaatatggaaaatctgggcatggtgtctcacacctgtaatcccagcactttgggaggctgaggtgggtggactgcttggagctcaggagttcaagaccatcttggacaacatggtgataccctgcctctacaaaaagtacaaaaattagcctggcatggtggtgtgcacctgtaatcccagctattagggtggctgaggcaggagaattgcttgaacccgggaggcggaggttgcagtgagctgagatcgtgccactgcactccagcctgggggacagagcacattataattaactgttattttttacttggactcttgtggggaataagatacatgttttattcttatttatgattcaagcactgaaaatagtgtttagcatccagcaggtgcttcaaaaccatttgctgaatgattactatactttttacaagctcagctccctctatcccttccagcatcctcatctctgattaaataagcttcagtttttccttagttcctgttacatttctgtgtgtctccattagtgacctcccatagtccaagcatgagcagttctggccaggcccctgtcggggtcagtgccccacccccgccttctggttctgtgtaaccttctaagcaaaccttctggctcaagcacagcaatgctgagtcatgatgagtcatgctgaggcttagggtgtgtgcccagatgttctcagcctagagtgatgactcctatctgggtccccagcaggatgcttacagggcagatggcaaaaaaaaggagaagctgaccacctgactaaaactccacctcaaacggcatcataaagaaaatggatgcctgagacagaatgtgacatattctagaatatattatttcctgaatatatatatatatatacacatatacgtatatatatatatatatatatatttgttgttatcaattgccatagaatgattagttattgtgaatcaaatatttatcttgcaggtggcctctatacctagaagcggcagaatcaggctttattaatacatgtgtatagatttttaggatctatacacatgtattaatatgaaacaaggatatggaagaggaaggcatgaaaacaggaaaagaaaacaaaccttgtttgccattttaaggcacccctggacagctaggtggcaaaaggcctgtgctgttagaggacacatgctcacatacggggtcagatctgacttggggtgctactgggaagctctcatcttaaggatacatctcaggccagtcttggtgcattaggaagatgtaggcaactctgatcctgagaggaaagaaacattcctccaggagagctaaaagggttcacctgtgtgggtaactgtgaaggactacaagaggatgaaaaacaatgacagacagacataatgcttgtgggagaaaaaacaggaggtcaaggggatagagaaggcttccagaagaatggctttgaagctggcttctgtaggagttcacagtggcaaagatgtttcagaaatgtgacatgacttaaggaactatacaaaaaggaacaaatttaaggagaggcagataaattagttcaacagacatgcaaggaattttcagatgaatgttatgtctccactgagcttcttgaggttagcagctgtgagggttttgcaggcccaggacccattacaggacctcacgtatacttgacactgttttttgtattcatttgtgaatgaatgacctcttgtcagtctactcggtttcgctgtgaatgaatgatgtcttgtcagcctacttggtttcgctaagagcacagagagaagatttagtgatgctatgtaaaaacttcctttttggttcaagtgtatgtttgtgatagaaatgaagacaggctacatgatgcatatctaacataaacacaaacattaagaaaggaaatcaacctgaagagtatttatacagataacaaaatacagagagtgagttaaatgtgtaataactgtggcacaggctggaatatgagccatttaaatcacaaattaattagaaaaaaaacagtggggaaaaaattccatggatgggtctagaaagactagcattgttttaggttgagtggcagtgtttaaagggtgatatcagactaaacttgaaatatgtggctaaataactagaatactctttattttttcgtatcatgaatagcagatatagcttgatggccccatgcttggtttaacatccttgctgttcctgacatgaaatccttaatttttgacaaaggggctattcattttcattttatattgggcctagaaattatgtagatggtcctgaggaaaagtttatagcttgtctatttctctctctaacatagttgtcagcacaatgcctaggctataggaagtactcaaagcttgttaaattgaattctatccttcttattcaattctacacatggaggaaaaactcatcagggatggaggcacgcctctaaggaaggcaggtgtggctctgcagtgtgattgggtacttgcaggacgaagggtggggtgggagtggctaaccttccattcctagtgcagaggtcacagcctaaacatcaaattccttgaggtgcggtggctcactcctgtaatcacagcagtttgggacgccaaggtgggcagatcacttgaggtcaggagttggacaccagcccagccaacatagtgaaacctggtctctgcttaaaaatataaaaattagctggacgtggtgacgggagcctgtaatccaactacttgggaggctgaggcaggagaatcgcttgaaccggggaggtggagtttgcactgagcagagatcatgccattgcactccagcctccagagcgagactctgtctaaagaaaaacgaaaacaaacaaacaaacaaacaaacaaaacccatcaaattccctgaccgaacagaattctgtctgattgttctctgacttatctaccattttccctccttaaagaaactgtgaacttccttcagctagaggggcctggctcagaagcctctggtcagcatccaagaaatacttgatgtcactttggctaaaggtatgatgtgtagacaagctccagagatggtttctcatttccatatccacccacccagctttccaattttaaagccaattctgaggtagagactgtgatgaacaaacaccttgacaaaattcaacccaaagactcactttgcctagcttcaaaatccttactctgacatatactcacagccagaaattagcatgcactagagtgtgcatgagtgcaacacacacacacaccaattccatattctctgtcagaaaatcctgttggtttttcgtgaaaggatgttttcagaggctgaccccttgccttcacctccaatgctaccactctggtctaagtcactgtcaccaccacctaaattatagctgttgactcataacaatcttcctgcttctaccactgccccactacaatttcttcccaatatactatccaaattagtcttttcaaaatgtaagtcatatatggtcacctctttgttcaaagtcttctgatagtttcctatatcatttataataaaaccaaatccttacaattctctacaatagttgttcatgcatatattatgtttattacagatacatatatatagctctcatataaataaatatatatatttatgtgtatgtgtgtagagtgttttttcttacaactctatgatgtaggtattattagtgtcccaaattttataatttaggacttctatgatctcatcttttattctccccttcaccgaatctcatcctacattggccttattgatattccttgaaaattctaagcatcttacatctttagggtatttacatttgccattccctatgccctaaatatttaatcatagtttcatataaatgggttcctcatcatctatgggtactctctcaggtgttaactttatagtgaggactttcctgccatactacttaaagtagcgataccctttcaccctgtcctaatcacactctggccttcatttcagttttttttttttctccatagcacctaatctcattggtatataacatgtttcatttgcttatttaatgtcaagctctttccactatcaagtccatgaaaacaggaactttattcctctattctgtttttgtgctgtattcttagcaattttacaattttgaatgaatgaatgagcagtcaaacacatatacaactataattaaaaggatgtatgctgacacatccactgctatgcacacacaaagaaatcagtggagtagagctggaagtgctaagcctgcatagagctagttagccctccgcaggcagagccttgatgggattactgagttctagaattggactcatttgttttgtaggctgagatttgctcttgaaaacttgttctgaccaaaataaaaggctcaaaagatgaatatcgaaaccagggtgttttttacactggaatttataactagagcactcatgtttatgtaagcaattaattgtttcatcagtcaggtaaaagtaaagaaaaactgtgccaaggcaggtagcctaatgcaatatgccactaaagtaaacattatttcataggtgtcagatatggcttattcatccatcttcatgggaaggatggccttggcctggacatcagtgttatgtgaggttcaaaacacctctaggctataaggcaacagagctccttttttttttttctgtgctttcctggctgtccaaatctctaatgataagcatacttctattcaatgagaatattctgtaagattatagttaagaattgtgggagccattccgtctcttatagttaaatttgagcttcttttatgatcactgtttttttaatatgctttaagttctggggtacatgtgccatggtggtttgctgcacccatcaacccgtcatctacattaggtatttctcctaatgctatccttcccctagccccccacccccaacaggccccagtgtgtgatgttcccctccctgtgtccatggatcactggtttttttttgttttttttttttttttaaagtctcagttaaatttttggaatgtaatttattttcctggtatcctaggacttgcaagttatctggtcactttagccctcacgttttgatgataatcacatatttgtaaacacaacacacacacacacacacacacacatatatatatatataaaacatatatatacataaacacacataacatatttatcgggcatttctgagcaactaatcatgcaggactctcaaacactaacctatagccttttctatgtatctacttgtgtagaaaccaagcgtggggactgagaaggcaatagcaggagcattctgactctcactgcctttagctaggcccctccctcatcacagctcagcatagtcctgagctcttatctatatccacacacagtttctgacgctgcccagctatcaccatcccaagtctaaagaaaaaaataatgggtttgcccatctctgttgattagaaaacaaaacaaaataaaataagcccctaagctcccagaaaacatgactaaaccagcaagaagaagaaaatacaataggtatatgaggagactggtgacactagtgtctgaatgaggcttgagtacagaaaagaggctctagcagcatagtggtttagaggagatgtttctttccttcacagatgccttagcctcaataagcttgcggttgtggaagtttactttcagaacaaactcctgtggggctagaattattgatggctaaaagaagcccgggggagggaaaaatcattcagcatcctcacccttagtgacacaaaacagagggggcctggttttccatatttcctcatgatggatgatctcgttaatgaaggtggtctgacgagatcattgcttcttccatttaagccttgctcacttgccaatcctcagttttaaccttctccagagaaatacacattttttattcaggaaacatactatgttatagtttcaatactaaataatcaaagtactgaagatagcatgcataggcaagaaaaagtccttagctttatgttgctgttgtttcagaatttaaaaaagatcaccaagtcaaggacttctcagttctagcactagaggtggaatcttagcatataatcagaggtttttcaaaatttctagacataagattcaaagccctgcacttaaaatagtctcatttgaattaactctttatataaattgaaagcacattctgaactacttcagagtattgttttatttctatgttcttagttcataaatacattaggcaatgcaatttaattaaaaaaacccaagaatttcttagaattttaatcatgaaaataaatgaaggcatctttacttactcaaggtcccaaaaggtcaaagaaaccaggaaagtaaagctatatttcagcggaaaatgggatatttatgagttttctaagttgacagactcaagttttaaccttcagtgcccatcatgtaggaaagtgtggcataactggctgattctggctttctactcctttttcccattaaagatccctcctgcttaattaacattcacaagtaactctggttgtactttaggcacagtggctcccgaggtcagtcacacaataggatgtctgtgctccaagttgccagagagagagattactcttgagaatgagcctcagccctggctcaaactcacctgcaaacttcgtgagagatgaggcagaggtacactacgaaagcaacagttagaagctaaatgatgagaacacatggactcatagagggaaacaacgcatactggggcctatcagagggtggagggtgagagaaggagaggatcaggaaaaatcactaatggatgctaagcgtaatacctgagtgatgagatcatctatacaacaaacccccttgacattcatttatctatgtaacaaacctgcacatcctgtacatgtacccctgaacttaaaataaaagttgaaaacaagaaagcaacagtttgaacacttgttatggtctattctctcattctttacaattacactagaaaatagccacaggcttcctgcaaggcagccacagaatttatgacttgtgatatccaagtcattcctggataatgcaaaatctaacacaaaatctagtagaatcatttgcttacatctatttttgttctgagaatatagatttagatacataatggaagcagaataatttaaaatctggctaatttagaatcctaagcagctcttttcctatcagtggtttacaagccttgtttatatttttcctattttaaaaataaaaataaagtaagttatttgtggtaaagaatattcattaaagtatttatttcttagataataccatgaaaaacattcagtgaagtgaagggcctactttacttaacaagaatctaatttatataatttttcatactaatagcatctaagaacagtacaatatttgactcttcaggttaaacatatgtcataaattagccagaaagatttaagaaaatattggatgtttccttgtttaaattaggcatcttacagtttttagaatcctgcatagaacttaagaaattacaaatgctaaagcaaacccaaacaggcaggaattaatcttcatcgaatttgggtgtttctttctaaaagtcctttatacttaaatgtcttaagacatacatagattttattttactaattttaattatatagacaataaatgaatattcttactgattactttttctgactgtctaatctttctgatctatcctggatggccataacacttatctctctgaactttgggcttttaatataggaaagaaaagcaataatccatttttcatggtatctcatatgataaacaaataaaatgcttaaaaatgagcaggtgaagcaatttatcttgaaccaacaagcatcgaagcaataatgagactgcccgcagcctacctgacttctgagtcaggatttataagccttgttactgagacacaaacctgggcctttcaatgctataacctttcttgaagctcctccctaccacctttagccataaggaaacatggaatgggtcagatccctggatgcaagccaggtctggaaccataggcagtaaggagagaagaaaatgtgggctctgcaactggctccgagggagcaggagaggatcaaccccatactctgaatctaagagaagactggtgtccatactctgaatgggaagaatgatgggattacccatagggcttgttttagggagaaacctgttctccaaactcttggccttgagatacctggtccttattccttggactttggcaatgtctgaccctcacattcaagttctgaggaagggccactgccttcatactgtggatctgtagcaaattccccctgaaaacccagagctgtatcttaattggttaaaaaaaattatattatctcaacgactgttcttctctgagtagccaagctcagcttggttcaagctacaagcagctgagctgctttttgtctagtcattgttcttttatttcagtggatcaaatacgttctttccaaacctaggatcttgtcttcctaggctatatattttgtcccaggaagtcttaatctggggtccacagaacactagggggctggtgaagtttatagaaaaaaaatctgtatttttacttacatgtaactgaaatttagcattttcttctactttgaatgcaaaggacaaactagaatgacatcatcagtacctattgcatagttataaagagaaaccacagatattttcatactacaccataggtattgcagatctttttgtttttgtttttgtttgagatggagtttcgctcttattgcccaggctggagtgcagtggcatgatttcggctcactgcaacctccccttcctgcattcaagcaattctcctgccttggcctcctgagtagctggggattacaggcacctgccaccatgccagtctaatttttgtatttttagtagagatggggtttcgccatgttggccaggctggtcttgaactcctgacctcagatgatctgcccgccttggcctcctgaagtgctgggattataggtgtgagccaccacgcctggcccattgcagatatttttaattcacatttatctgcatcactacttggatcttaaggtagctgtagacccaatcctagatctaatgctttcataaagaagcaaatataataaatactataccacaaatgtaatgtttgatgtctgataatgatatttcagtgtaattaaacttagcactcctatgtatattatttgatgcaataaaaacatatttttttagcacttacagtctgccaaactggcctgtgacacaaaaaaagtttaggaattcctggttttgtctgtgttagccaatggttagaatatatgctcagaaagataccattggttaatagctaaaagaaaatggagtagaaattcagtggcctggaataataacaatttgggcagtcattaagtcaggtgaagacttctggaatcatgggagaaaagcaagggagacattcttacttgccacaagtgtttttttttttttttttttttatcacaaacataagaaaatataataaataacaaagtcaggttatagaagagagaaacgctcttagtaaacttggaatatggaatccccaaaggcacttgacttgggagacaggagccatactgctaagtgaaaaagacgaagaacctctagggcctgaacatacaggaaattgtaggaacagaaattcctagatctggtggggcaaggggagccataggagaaagaaatggtagaaatggatggagacggaggcagaggtgggcagatcatgaggtcaagagatcgagaccatcctggcaaacatggtgaaatcccgtctctactaaaaataaaaaaattagctgggcatggtggcatgcgcctgtagtcccagctgctcgggaggctgaggcaggagaatcgtttgaacccaggaggcgaaggttgcagtgagctgagatagtgccattgcactccagtctggcaacagagtgagactccgtctcaaaaaaaaaaaaaaaagaaagaaagaaaagaaaaagaaaaaagaaaaaataaatggatgtagaacaagccagaaggaggaactgggctggggcaatgagattatggtgatgtaagggacttttatagaattaacaatgctggaatttgtggaactctgcttctattattcccccaatcattacttctgtcacattgatagttaaataatttctgtgaatttattccttgattctaaaatatgaggataatgacaatggtattataagggcagattaagtgatatagcatgagcaatattcttcaggcacatggatcgaattgaatacactgtaaatcccaacttccagtttcagctctaccaagtaaagagctagcaagtcatcaaaatggggacatacagaaaaaaaaaaggacactagaggaataatataccctgactcctagcctgattaatatatcgattcacttttttctctgtttgatgacaaattctggctttaaataattttaggattttaggcttctcagctcccttcccagtgagaagtataagcaggacagacaggcaagcaagaagagagccccaggcaatactcacaaagtagccaatgtcccctgtggtcatagagaaatgaaaagagagaggattctctggaagcactggatgtaatcttttctgtctgtcctctctagggaatcaccccaaggtactgtactttgggattaaggctttagtcccactgtggactacttgctattctgttcagtttctagaaggaactatgtacggtttttgtctccctagagaaactaaggtacagaagttttgtttacaatgcactccttaagagagctagaactgggtgagattctgttttaacagctttattttcttttccttggccctgtttttgtcactgtcaccacctttaaggcaaatgttaaatgcgctttggctgaaactttttttcctattttgagatttgctcctttatatgaggctttcttggaaaaggagaatgggagagatggatatcattttggaagatgatgaagagggtaaaaaaggggacaaatggaaatttgtgttgcagatagatgaggagccaacaaaaaagagcctcaggatccagcacacattatcacaaacttagtgtccatccatcactgctgaccctctccggacctgactccacccctgagggacacaggtcagccttgaccaatgacttttaagtaccatggagaacagggggccagaacttcggcagtaaagaataaaaggccagacagagaggcagcagcacatatctgcttccgacacagctgcaatcactagcaagctctcaggcctggcatcatggtgcattttactgctgaggagaaggctgccgtcactagcctgtggagcaagatgaatgtggaagaggctggaggtgaagccttgggcaggtaagcattggttctcaatgcatgggaatgaagggtgaatattaccctagcaagttgattgggaaagtcctcaagattttttgcatctctaattttgtatctgatatggtgtcatttcatagactcctcgttgtttacccctggacccagagattttttgacagctttggaaacctgtcgtctccctctgccatcctgggcaaccccaaggtcaaggcccatggcaagaaggtgctgacttcctttggagatgctattaaaaacatggacaacctcaagcccgcctttgctaagctgagtgagctgcactgtgacaagctgcatgtggatcctgagaacttcaaggtgagttcaggtgctggtgatgtgattttttggctttatattttgacattaattgaagctcataatcttattggaaagaccaacaaagatctcagaaatcatgggtcgagcttgatgttagaacagcagacttctagtgagcataaccaaaacttacatgattcagaactagtgacagtaaaggactactaacagcctgaattggcttaacttttcaggaaatcttgccagaacttgatgtgtttatcccagagaattgtattatagaattgtagacttgtgaaagaagaatgaaatttggcttttggtagatgaaagtccatttcaaggaaatagaaatgccttattttatgtgggtcatgataattgaggtttagaaagagatttttgcaaaaaaaataaaagatttgctcaaagaaaaataagacacattttctaaaatatgttaaatttcccatcagtattgtgaccaagtgaaggcttgtttccgaatttgttggggattttaaactcccgctgagaactcttgcagcactcacattctacatttacaaaaattagacaattgcttaaagaaaaacagggagagagggaacccaataatactggtaaaatggggaagggggtgagggtgtaggtaggtagaatgttgaatgtagggctcatagaataaaattgaacctaagctcatctgaattttttgggtgggcacaaaccttggaacagtttgaggtcagggttgtctaggaatgtaggtataaagccgtttttgtttgtttgtttgttttttcatcaagttgttttcggaaacttctactcaacatgcctgtgtgttattttgtcttttgcctaacagctcctgggtaacgtgatggtgattattctggctactcactttggcaaggagttcacccctgaagtgcaggctgcctggcagaagctggtgtctgctgtcgccattgccctggcccataagtaccactgagttctcttccagtttgcaggtgttcctgtgaccctgacaccctccttctgcacatggggactgggcttggccttgagagaaagccttctgtttaataaagtacattttcttcagtaatcaaaaattgcaattttatcttctccatcttttactcttgtgttaaaaggaaaaagtgttcatgggctgagggatggagagaaacataggaagaaccaagagcttccttaagaaatgtatgggggcttgtaaaattaatgtggatgttatgggagaattccaggattccaaggaggatgatatgatggagaaaaatctttatcggggtgggaaaatggttaattaagtggacagagactcctaggcagtttttactgcaccggggaaagaaggagctgttagtggtacctgagaaagcagatttgtggtacatgtcacttttcattaaaaacaaaaacaaaacaaaacaaaacttcatagatatccaagatataggctagaattactattttaatttactcttatttacattttgaagtagctagcttgtcacatgttttatgaaattgatttggagataagatgagtgtgtatcaacaatagcctgctctttccatgaaggattccattatttcatgggttagctgaagctaagacacatgatatcattgtgcattatcttctgatagaatgtaacatgcactaaaataaagttagagttaggacctgagtgggaaagtttttggagagtgtgatgaagactttccgtgggagatagaatactaataaaggcttaaattctaaaaccagcaagctagggcttcgtgacttgcatgaaactggctctctggaagtagaagggagagtaagacatacgtagaggactaggaaagaccagatagtacagggcctggctacaaaaatacaagcttttactatgctattgcaatactaaacgataagcattaggatgttaagtgactcaggaaataagattttgggaaaaagtaatctgcttatgtgcacaaaatggattcaagtttgcagataaaataaaatatggatgatgattcaaggggacagatacaatggttcaaacccaagaggagcagtgagtctgtggaatttgaaggatggacaaaggtggggtgagaaagacatagtattcgactgactgtgggagatgagaaggaagaaggaggtgataaatgactgaaagctcccagactggtgaagataacaggaggaaaccatgcactgacctggtgactctcatgtgtgaagggtagagggatattaacagatttactttttaggaagtgctagattggtcagggagttttgaccttcaggtcttgtgtctttcatatcaaggaacctttgcattttccaagttagagtgccatattttggcaaatataactttattagtaattttatagtgctctcacattgatcagactttttcctgtgaattacttttgaatttggctgtatatatccagaatatgggagagagacaaataattattgtagttgcaggctatcaacaatactggtctctctgagccttataacctttcaatatgcccataaacagagtaaacagggattattcatggcactaaatattttcacctagtcagtcaacaaatgggagcaatgtgcattttttgatacatatttttatatatttatggggtacatgtgatacttacatgcctagaacatgtgatgattaagtctagatatttaggatatccattgctttgagcatttatcatttctatgtattgagaaaatttcaaatcctcatttctagccattttgaaatatataataaatagtaattaactatagtcaccctactcaaatatcaaacattatggcttaatccttctatccaactgtgtttgtacctattaaccaacatctcttaaatcccctcccatacacactcacactttttccagcctctgataactatcattctactctctaccaccatgagacccacttttttagctcccacagatgaataaaaacatgtgatatttgactttctgtatctggcttattttattatctatctctttggcataccaagagtttgtttttgttctgcttcagggctttcaattaacataatgacctctggttccatccatgttgctacaaatgacaagatttcattctttttcatggcaaaatagtactgtgcaaaaatacaattttttaatccgttcatctgttgatagacacttaggttgatcccaaaccttaactattgtgaatagtgcttcaataaacatgagtgtaatgtgtccattggatatactgatttcctttcttttggataaataaccactagtgagattgctggattgtatgatagttctgtttttagtttactgagaaatcttcatactgttttccataatggttgtactattttacattcccaccaacagtgtgtaagaaagagttcccttttctccatatcctcacaaggatctgttattttttgtcttttttgttaatagccgttttaactagagtaagtagatatctcattgtagttttgatttgcatttccctgatcattagtgatgttgagaattttttcatatgtttgttggtcatttgtatatctttttctgagaattgtctgttcatgtccttagcctactttttattgggattgtttgttattttcttgataatctatttgtgttcattttagagcctggatattattcttttgtcagatgtatagattgtgaagattttctcccactctgtgggttgtctgtttattctgcagactcttccttttgccatgcaaaagctctttagtttaatttagtcccagatattttctttgtttttatgtatttgcatttgtgttcttggtcatgaaatcctttcctaagccaatgtgtagaagggtttttccgatgttattttctagaattgttacagtttcagggcttagatttaagtccttgatccatcttgagttgatttttgtataaggtgagagatgaagatccagtttcattctcctacatgtagcttgccagctatccccgcaccatttgttgaatagggtgccctttccccactttatgtttttgtttgctttgtcaaagatcagttggatgtaagtatttgagtttatttctgggttctctattctgttccattggtcgatgtgcctatttgtacaccagcatcatgctgttttggtgactatggccttattgtatagtttgaaatgaggtaatgtaatgccttcagatttgttcttttttttagacttgcttgtttattgggctcttttttggttccataagaattttaggattgttttttctagttctgtgaagactaatggtggtattttgatgggaattgcaatgaatttgtaggttgcttctggcattatggccattttcacaatattgattctacccatctatgagaatggcatgtgtttccatttgtttgtgtcttatatgattactttcagccgtgttttgtagttttccttgtagatgtctttcacctccttggttaggtatatattcctaagtttttgttttgttttgttttgttttttgcagctattgtaaaaggggttgagttcttgattttattctcagcttggtcattgctggtatgtaagaaagcaactcattggtgtacgttaattttgtatccagaaactttgctgaattattttatcagttctagggggttttggaggagtctttagagttttctacatacacaatcatatcatcagcaaacagtgacagtttgactttctctttaacaatttggatgtgctttacttgtttctcttgtctgattgctcttgctaggacttccagtaatatgttaaagagaagtggtgagagtgggtatccttgtctcattccagttttcagacagaatgcttttaactttttcccattcaatataatgttggctgtgtgtttaccatagctggcttttattacattgaggtatgtcctttgtaaaccgattttgctgagttttagtcataaagtgatgttgaattttgttgaatgcagtttctgtggctattgagataatcacatgatttttgtttccaattctctttatgttgtgtatcacacttattgacttgcgtatgttaaaccatccgtgcatccctcgcatgaaacccacttgatcatgggttttgatatgctgtcggatgctattagctagtattttgtcaaggatgttggcatctatgttcatcagggatattgatctgtagtgttttttttttttggttatgttctttcccagttttggtattaaggtgatactggcttcatagaatgatttagggaggattctctctttctctatcttgtagaatactgtcaataggattggtatcaattcttctttgaatgtctggtagaattcagctgtgaatctatctggtcctggacttttttgttgttggtaaatttttattatcatttcagtcttgctgcttattactggtctgttcagggtatctaattcttcctgacttaagctagagccctgtatctttccaggaattcgaacgtctcctttaggttttctagtttatgcatgtaaaggtgttcatagtagccttgaataatcttttgtatttctgtggtatcagtaatagtatctcctgttttgtttctaattgagtttatttgcacttctctcctcttttcttggttaatcttgctaatggtctatcagttttatttatcttttcaaagaaccagctttttatttcatttagcttttgtatttttttgcagttgttttaatttcatttagttctcctcttatcttagttattccctttcttttgctgggttttggttctgtttgtttttgtttctctagtttcttgtggtgtgaccttatattgtctgtctgtcctctttcagactctttgacatcgacatttagggctgtgaactttccttttagcaccatctttgctgtatcctagaggttttgataggttgtgtcactattgtcggtcagttcaagtaattttgttgttcttattatactttaagttctgggatacatgtgcagaatgtgcaggtttgttacataggtatagatgtgccatggtggtttgctgcacccatcaacctgtcatctacattaggtatttcttttaatgttatccctctcctaaccccctcaccccccgacaggccctggtgtgtgatgttcccctccctgtgtccatgtgttctcattgttcaactcccacttatgagtgagaacgtgtggtgtttggtttctctgttcctgtgttagtttgctcagaatgatggtttccaccttcatccatgtccctgcaaagacatgaactcatcatttttatggctgcatagtattccatggtgtatatgtgccacattttctttatccattatatcgctgatggccatttgggttggttccaagtctttgctattgtgaatagtgccacaataaacatacgtgtgcacgtgtctttatagtagaatgatttctaattctttgggtatatacccagtaatgggattgctgggtcaaacagtatttctggttctagatccttgaggaatcgccacactgtcttccacaatggttgaactaatttacacacccatcaacagtgtaaaatttttcctattcttccacatcctctccagcaccttttgtttcctgactttttaataattgccattctaactggcatgagatggtatctcattgtggttttgatttgcatttctctaatgaccagtgatgatgagcttcttttcatgtgtttcttggccacataaatgacttctttagagaagcatctgttcatatcctttgtccactttttgatggggtcgttaggttttttcttgtaaatttgttgaagttctttgtagattttggatgttagccctttgtcagatggatagattgcaaaaattttctcccattctgtaggttgcctgttcactctgatgatagtcttttgctgtgcagaagctctttagtttaattagatcccatatgtcaattttggcctttgttgtcattgcttttgatgttttagtcgtgaatttttgcccatgcctatgtcctgaatggtattgcctaggttatcttctaggatttttatggttttaggttgcacatttaagtctttaatccaccttgagttaatttttgtataaggtgtaaggaaggggtacagtttcagttttatgcatattgctagccagtttttccagcaccatttattaaatagggaattctttctccattgcttttgtgatgtttgtcaaagatcagatggtcgtagatgtgtggcattatttctgaggcttctgttctgttccactggtctatatatctgttttggtaccagtaccatgctgtttttgttactgtagccttgtagtatagtttgaagtcaggtagcatcatgcctccagctttgttctttttgtttaggattgtcttggctatatgggctcttttttgattccatatgacatttaaagtagttttttctaattctttgaaaaaagtcagtggtagcttgatggggatagcattgaatctataaattactttgggcagtatggccattttaaagatattgattctttctatctatgagcatggaatgtttttccatttgtttgtgtcctctcttatttccttgagcagtgagtggtttgtagctctccttgaagaggttcttcacatcccttagaagttgtatttctaggtattttattttattctctttgcagcaattgtgaatgggagttcacccatgatttggctctctgcttgtctattattggtgtataggaacgcttgtgatttctgcacactgattttgtatcttgagactttgctgaagctgtttatcagcttaagattttgggctgagatgacagggtcttctaaatatacaatcatgtcatctgcaaacagagacaatttgacttcctctcttcctatttgaatatgctttatttctttctcttgcctgattgtcctggcgagaacttccaatactatgttgagtaagagtggcgagagggcatccttgtcttgtgccggttttcaaagcaaatgatttttaaatttccatcttgatttcattgttgacccaatgatcattcaggagcaggttatttaatttccctgtatttgcatggttttgaaggttccttttgtagttgatttccaattttattctactgtggtctgagagagtgcttgatataatttcaatttttaaaaatttattgaggcttgttttgtggcatatcatatggcctatcttggagaaagttccatgtgctgatgaatagaatgtgtattctgcagttgttgggtagaatgtcctgtaaatatctgttaagtccatttgttctttaaatccattgtttctttgtagactgtcttgatgacctgcctagtgcagtcagtggagtattgaagtcccccactattattatgttgctgtctagtctagtagtaattgttttataaatttgggatctccagtattagatgcatatatattaagaattgtaatattctcccattggacaagggcttttatcattatatgatgtccctctttgtcttttttaactgctgtttctttaaagtttgttttgtctgacataagaatagctgctttggctcgcttttggtgtccatttgtgtggaatgtcattttccacccctttaccttaagtttatgtgagtccttatgtgttaggtgagtctcctgaaggcggcagataactggttggtgaattcttattcattctgcaattctgtatcttttaagtggagcatttagtccatttacattcaacatcagtattgaggtgtgaggtactattccattcttcgtggtatttgttgcctgtgtatctttttatctgtatttttgttgtatatgtcctatgggatttatgctttaaagaggttctgttttgatgtgcttccagggtttatttcaagatttagagctccttttatcagttcttgtagtgttggcttggtagtgccgaattctctcagcatttgtttttctgaaaaacactgtgtattttcttcatttgtgaagcttagtttcactggatataaaattcttggctgataattgttttgtttaagaaggctgaagatagggccatattcacttctagcttttacggtttctgctgagaaatctgctgttaatctgataggttttctttcataggttacctggtagtttcacctcacagctcttaagattctctttgtctttagataactttggatactctgatgacaatgtacctaggcaatgatatttttgcaatgaatttcccaggtgtttattgagcttcttgtatttggatatctaggtctctagcaaggtgggggaagttttccttgattatttccctggataagttttccaaacttttagatttctcttctttctcaggaatgctgattattcttaggtttgattgtttaacataatcccagatttcttggaggctttgttcatattttcttattcttttttctttgtctttgttggattgggttaattcaaaaactttgtcttcaagctctgaatttcttctgcttggattctattgctgagactttctagagcattttgcatttctataagtgcatccattcatccattgtttcctgaagttttgaatgttttttatttatgctatctctttaactgaagatttctcccctcatttcttgtatcatatttttggtttttttaaaattggacttcaccttcctcggatgcctccttgattagcttaataactgaccttctgaattatttttcaggtaaatcagggatttcttcttggtttggatgcattgctggtgagctagtatgattttttggggggtgttaaagaaccttgtttttcatattaccagagttagttttctggttccttctcacttgggtaggctctgtcagagggaaagtctaggcctcaaggctgagacttttgtcccatgaggtgttcccttgatgtagcacagtcccccttttcctaggcgtggggcttcctgagagccgaactgtagtgattgttatctctcttctggatctagccacccatcaggtctaccagactccaggctggtactggggtttgtctgcacagagtcttgtgacgtgaaccatctgtgggtctctcagccatagatacaaccacctgctccaatggaggtggcagaggatgaaatggactctgtgagggtccttacttttggttgttcaatgcactatttttgtgctggttggcctcctgccaggaggtggcactttctagaaagcatcagcagaggcagtcaggtggtggtggctgggggggctggggcaccctagaactcccaagaatatatgccctttgtcttcagctaccagggtgagtaaggaaggaccatcaggtgggggcaggactagtcgtgtctgagctcagagtctccttgggcaggtctttctgtggctactgtgggaggatgggggtgtagtttccaggtcaatggatttatgttcctaggacaattatggctgcctctgctgtgtcatgcaggtcatcaggaaagtgggggaaagcaagcagtcacgtgacttgcccagctcccatgcaactcaaaaggttggtctcacttccagcgtgcaccctcccccgcaacagcaccgaatctgtttccatgcagtcagtgagcaaggctgagaacttgccccaggctaccagctgcgaaaccaagtagggctgtcctacttccctgccagtggagtctgcacaccaaattcatgtccccccaccaacccccccactgcccagcccctagatctggccaggtggagattttctttttcctgtcatcttttcccagttcctctggcagccctcccaaatgacccctgtgaggcaaggcagaaatggcttcctaggggacccagagagcccacagggcttttcccgctgcttcctctacccctgtattttgcttggccctctaaattgactcagctccaggtaaggtcagaatcttctcctgtggtctagatcttcaggttccccagtgaggatgtgtgtttgggggtagacggtcccccttttccacttccacagtttgggcactcacaatatttggggtgtttcccgggtcctgcaggagcaatctgcttctttcagagggtgtgtgcgttctctcagctttcttgatttatttctgcaggtggttctgcaaaaaaaattcctgatgggagacttcacatgctgctctgtgcatccgagtgggagctgcaatgtacttctgctgcctcccatctgccatcaccctctaatttgtcggtaatatgcatttttaatcaatctttttttctctctctctctttttcttctcccccaaaactatactgccctttgatatcaaggaatcaaggacgtgatgttgaggggtgggcagtggatacactctttaccccttagggagctatatctagatttagatattgccaattcaagataacttaattgaaagcaaattcataatgaatacacacacacacacacacatctgcatgacaagatttttaatagttgaaagaataactaataattgtccacaggcaataagggctttttaagcaaaacagttgtgataaacaggtcattcttagaatagtaatccagccaatagtacaggttgcttagagattatgtcattaccagagttaaaattctataatggcttctcactccctaccactgaggacaagtttatgtccttaggtttatgcttccctgaaacaataccacctgctattctccactttacatatcaacggcactggttctttatctaactctctggcacagcaggagtttgttttcttctgcttcagagctttgaatttactatttcagcttctaaactttatttggcaatgccttcccatggcagattccttctgtcattttgcctctgttcgaatactttctccttaatttcattcttagttaataatatctgaaattattttgttgtttaacttaattattaattttatgtatgttctacctagattataatcttcagaggaaagttttattctctgacttatttaacttaaatgcccactactttaaaaattatgacatttatttaacagatatttgctgaacaaatgtttgaaaatacatgggaaagaatgcttgaaaacacttgaaattgcttgtgtaaagaaacagttttatcagttaggatttaatcaatgtcagaagcaatgatataggaaaaatcgaggaataagacagttatggataaggagaaatcaacaaactcttaaaagatattgcctcaaaagcataagaggaaataagggtttatacatgacttttagaacactgccttggtttttggataaatggggaagttgtttgaaaacaggagggatcctagatattccttagtctgaggaggagcaattaagattcacttgtttagaggctgggagtggtggctcacgcctgtaatcccagaattttgggaggccaaggcaggcagatcacctgaggtcaagagttcaagaccaacctggccaacatggtgaaatcccatctctacaaaaatacaaaaattagacaggcatgatggcaagtgcctgtaatcccagctacttgggaggctgaggaaggagaattgcttgaacctggaaggcaggagttgcagtgagccgagatcataccactgcactccagcctgggtgacagaacaagactctgtctcaaaaaaaaaaaagagagattcaaaagattcacttgtttaggccttagcgggcttagacaccagtctctgacacattcttaaaggtcaggctctacaaatggaacccaaccagactctcagatatggccaaagatctatacacacccatctcacagatcccctatcttaaagagaccctaatttgggttcacctcagtctctataatctgtaccagcatacc

SEQ ID NO: 510 - DNA, 25794 bp, Homo sapiens
ggtatgctggtacagattatagagactgaggtgaacccaaattagggtctctttaagataggggatctgtgagatgggtgtgtatagatctttggccatatctgagagtctggttgggttccatttgtagagcctgacctttaagaatgtgtcagagactggtgtctaagcccgctaaggcctaaacaagtgaatcttttgaatctctcttttttttttttgagacagagtcttgttctgtcacccaggctggagtgcagtggtatgatctcggctcactgcaactcctgccttccaggttcaagcaattctccttcctcagcctcccaagtagctgggattacaggcacttgccatcatgcctgtctaatttttgtatttttgtagagatgggatttcaccatgttggccaggttggtcttgaactcttgacctcaggtgatctgcctgccttggcctcccaaaattctgggattacaggcgtgagccaccactcccagcctctaaacaagtgaatcttaattgctcctcctcagactaaggaatatctaggatccctcctgttttcaaacaacttccccatttatccaaaaaccaaggcagtgttctaaaagtcatgtataaacccttatttcctcttatgcttttgaggcaatatcttttaagagtttgttgatttctccttatccataactgtcttattcctcgatttttcctatatcattgcttctgacattgattaaatcctaactgataaaactgtttctttacacaagcaatttcaagtgttttcaagcattctttcccatgtattttcaaacatttgttcagcaaatatctgttaaataaatgtcataatttttaaagtagtgggcatttaagttaaataagtcagagaataaaactttcctctgaagattataatctaggtagaacatacataaaattaataattaagttaaacaacaaaataatttcagatattattaactaagaatgaaattaaggagaaagtattcgaacagaggcaaaatgacagaaggaatctgccatgggaaggcattgccaaataaagtttagaagctgaaatagtaaattcaaagctctgaagcagaagaaaacaaactcctgctgtgccagagagttagataaagaaccagtgccgttgatatgtaaagtggagaatagcaggtggtattgtttcagggaagcataaacctaaggacataaacttgtcctcagtggtagggagtgagaagccattatagaattttaactctggtaatgacataatctctaagcaacctgtactattggctggattactattctaagaatgacctgtttatcacaactgttttgcttaaaaagcccttattgcctgtggacaattattagttattctttcaactattaaaaatcttgtcatgcagatgtgtgtgtgtgtgtgtgtattcattatgaatttgctttcaattaagttatcttgaattggcaatatctaaatctagatatagctccctaaggggtaaagagtgtatccactgcccacccctcaacatcacgtccttgattccttgatatcaaagggcagtatagttttgggggagaagaaaaagagagagagagaaaaaaagattgattaaaaatgcatattaccgacaaattagagggtgatggcagatgggaggcagcagaagtacattgcagctcccactcggatgcacagagcagcatgtgaagtctcccatcaggaattttttttgcagaaccacctgcagaaataaatcaagaaagctgagagaacgcacacaccctctgaaagaagcagattgctcctgcaggacccgggaaacaccccaaatattgtgagtgcccaaactgtggaagtggaaaagggggaccgtctacccccaaacacacatcctcactggggaacctgaagatctagaccacaggagaagattctgaccttacctggagctgagtcaatttagagggccaagcaaaatacaggggtagaggaagcagcgggaaaagccctgtgggctctctgggtcccctaggaagccatttctgccttgcctcacaggggtcatttgggagggctgccagaggaactgggaaaagatgacaggaaaaagaaaatctccacctggccagatctaggggctgggcagtgggggggttggtggggggacatgaatttggtgtgcagactccactggcagggaagtaggacagccctacttggtttcgcagctggtagcctggggcaagttctcagccttgctcactgactgcatggaaacagattcggtgctgttgcgggggagggtgcacgctggaagtgagaccaaccttttgagttgcatgggagctgggcaagtcacgtgactgcttgctttcccccactttcctgatgacctgcatgacacagcagaggcagccataattgtcctaggaacataaatccattgacctggaaactacacccccatcctcccacagtagccacagaaagacctgcccaaggagactctgagctcagacacgactagtcctgcccccacctgatggtccttccttactcaccctggtagctgaagacaaagggcatatattcttgggagttctagggtgccccagcccccccagccaccaccacctgactgcctctgctgatgctttctagaaagtgccacctcctggcaggaggccaaccagcacaaaaatagtgcattgaacaaccaaaagtaaggaccctcacagagtccatttcatcctctgccacctccattggagcaggtggttgtatctatggctgagagacccacagatggttcacgtcacaagactctgtgcagacaaaccccagtaccagcctggagtctggtagacctgatgggtggctagatccagaagagagataacaatcactacagttcggctctcaggaagccccacgcctaggaaaagggggactgtgctacatcaagggaacacctcatgggacaaaagtctcagccttgaggcctagactttccctctgacagagcctacccaagtgagaaggaaccagaaaactaactctggtaatatgaaaaacaaggttctttaacaccccccaaaaaatcatactagctcaccagcaatgcatccaaaccaagaagaaatccctgatttacctgaaaaataattcagaaggtcagttattaagctaatcaaggaggcatccgaggaaggtgaagtccaattttaaaaaaaccaaaaatatgatacaagaaatgaggggagaaatcttcagttaaagagatagcataaataaaaaacattcaaaacttcaggaaacaatggatgaatggatgcacttatagaaatgcaaaatgctctagaaagtctcagcaatagaatccaagcagaagaaattcagagcttgaagacaaagtttttgaattaacccaatccaacaaagacaaagaaaaaagaataagaaaatatgaacaaagcctccaagaaatctgggattatgttaaacaatcaaacctaagaataatcagcattcctgagaaagaagagaaatctaaaagtttggaaaacttatccagggaaataatcaaggaaaacttcccccaccttgctagagacctagatatccaaatacaagaagctcaataaacacctgggaaattcattgcaaaaatatcattgcctaggtacattgtcatcagagtatccaaagttatctaaagacaaagagaatcttaagagctgtgaggtgaaactaccaggtaacctatgaaagaaaacctatcagattaacagcagatttctcagcagaaaccgtaaaagctagaagtgaatatggccctatcttcagccttcttaaacaaaacaattatcagccaagaattttatatccagtgaaactaagcttcacaaatgaagaaaatacacagtgtttttcagaaaaacaaatgctgagagaattcggcactaccaagccaacactacaagaactgataaaaggagctctaaatcttgaaataaaccctggaagcacatcaaaacagaacctctttaaagcataaatcccataggacatatacaacaaaaatacagataaaaagatacacaggcaacaaataccacgaagaatggaatagtacctcacacctcaatactgatgttgaatgtaaatggactaaatgctccacttaaaagatacagaattgcagaatgaataagaattcaccaaccagttatctgccgccttcaggagactcacctaacacataaggactcacataaacttaaggtaaaggggtggaaaatgacattccacacaaatggacaccaaaagcgagccaaagcagctattcttatgtcagacaaaacaaactttaaagaaacagcagttaaaaaagacaaagagggacatcatataatgataaaagcccttgtccaatgggagaatattacaattcttaatatatatgcatctaatactggagatcccaaatttataaaacaattactactagactagacagcaacataataatagtgggggacttcaatactccactgactgcactaggcaggtcatcaagacagtctacaaagaaacaatggatttaaagaacaaatggacttaacagatatttacaggacattctacccaacaactgcagaatacacattctattcatcagcacatggaactttctccaagataggccatatgatatgccacaaaacaagcctcaataaatttttaaaaattgaaattatatcaagcactctctcagaccacagtagaataaaattggaaatcaactacaaaaggaaccttcaaaaccatgcaaatacagggaaattaaataacctgctcctgaatgatcattgggtcaacaatgaaatcaagatggaaatttaaaaatcatttgctttgaaaaccggcacaagacaaggatgccctctcgccactcttactcaacatagtattggaagttctcgccaggacaatcaggcaagagaaagaaataaagcatattcaaataggaagagaggaagtcaaattgtctctgtttgcagatgacatgattgtatatttagaagaccctgtcatctcagcccaaaatcttaagctgataaacagcttcagcaaagtctcaagatacaaaatcagtgtgcagaaatcacaagcgttcctatacaccaataatagacaagcagagagccaaatcatgggtgaactcccattcacaattgctgcaaagagaataaaataaaatacctagaaatacaacttctaagggatgtgaagaacctcttcaaggagagctacaaaccactcactgctcaaggaaataagagaggacacaaacaaatggaaaaacattccatgctcatagatagaaagaatcaatatctttaaaatggccatactgcccaaagtaatttatagattcaatgctatccccatcaagctaccactgacttttttcaaagaattagaaaaaactactttaaatgtcatatggaatcaaaaaagagcccatatagccaagacaatcctaaacaaaaagaacaaagctggaggcatgatgctacctgacttcaaactatactacaaggctacagtaacaaaaacagcatggtactggtaccaaaacagatatatagaccagtggaacagaacagaagcctcagaaataatgccacacatctacgaccatctgatctttgacaaacatcacaaaagcaatggagaaagaattccctatttaataaatggtgctggaaaaactggctagcaatatgcataaaactgaaactgtaccccttccttacaccttatacaaaaattaactcaaggtggattaaagacttaaatgtgcaacctaaaaccataaaaatcctagaagataacctaggcaataccattcaggacataggcatgggcaaaaattcacgactaaaacatcaaaagcaatgacaacaaaggccaaaattgacatatgggatctaattaaactaaagagcttctgcacagcaaaagactatcatcagagtgaacaggcaacctacagaatgggagaaaatttttgcaatctatccatctgacaaagggctaacatccaaaatctacaaagaacttcaacaaatttacaagaaaaaacctaacgaccccatcaaaaagtggacaaaggatatgaacagatgcttctctaaagaagtcatttatgtggccaagaaacacatgaaaagaagctcatcatcactggtcattagagaaatgcaaatcaaaaccacaatgagataccatctcatgccagttagaatggcaattattaaaaagtcaggaaacaaaaggtgctggagaggatgtggaagaataggaaaaattttacactgttgatgggtgtgtaaattagttcaaccattgtggaagacagtgtggcgattcctcaaggatctagaaccagaaatactgtttgacccagcaatcccattactgggtatatacccaaagaattagaaatcattctactataaagacacgtgcacacgtatgtttattgtggcactattcacaatagcaaagacttggaaccaacccaaatggccatcagcgatataatggataaagaaaatgtggcacatatacaccatggaatactatgcagccataaaaatgatgagttcatgtctttgcagggacatggatgaaggtggaaaccatcattctgagcaaactaacacaggaacagagaaaccaaacaccacacgttctcactcataagtgggagttgaacaatgagaacacatggacacagggaggggaacatcacacaccagggcctgtcggggggtgagggggttaggagagggataacattaaaagaaatacctaatgtagatgacaggttgatgggtgcagcaaaccaccatggcacatctatacctatgtaacaaacctgcacattctgcacatgtatcccagaacttaaagtataataagaacaacaaaattacttgaactgaccgacaatagtgacacaacctatcaaaacctctaggatacagcaaagatggtgctaaaaggaaagttcacagccctaaatgtcgatgtcaaagagtctgaaagaggacagacagacaatataaggtcacaccacaagaaactagagaaacaaaaacaaacagaaccaaaacccagcaaaagaaagggaataactaagataagaggagaactaaatgaaattaaaacaactgcaaaaaaatacaaaagctaaatgaaataaaaagctggttctttgaaaagataaataaaactgatagaccattagcaagattaaccaagaaaagaggagagaagtgcaaataaactcaattagaaacaaaacaggagatactattactgataccacagaaatacaaaagattattcaaggctactatgaacacctttacatgcataaactagaaaacctaaaggagacgttcgaattcctggaaagatacagggctctagcttaagtcaggaagaattagataccctgaacagaccagtaataagcagcaagactgaaatgataataaaaatttaccaacaacaaaaaagtccaggaccagatagattcacagctgaattctaccagacattcaaagaagaattgataccaatcctattgacagtattctacaagatagagaaagagagaatcctccctaaatcattctatgaagccagtatcaccttaataccaaaactgggaaagaacataaccaaaaaaaaaaaacactacagatcaatatccctgatgaacatagatgccaacatccttgacaaaatactagctaatagcatccgacagcatatcaaaacccatgatcaagtgggtttcatgcgagggatgcacggatggtttaacatacgcaagtcaataagtgtgatacacaacataaagagaattggaaacaaaaatcatgtgattatctcaatagccacagaaactgcattcaacaaaattcaacatcactttatgactaaaactcagcaaaatcggtttacaaaggacatacctcaatgtaataaaagccagctatggtaaacacacagccaacattatattgaatgggaaaaagttaaaagcattctgtctgaaaactggaatgagacaaggatacccactctcaccacttctctttaacatattactggaagtcctagcaagagcaatcagacaagagaaacaagtaaagcacatccaaattgttaaagagaaagtcaaactgtcactgtttgctgatgatatgattgtgtatgtagaaaactctaaagactcctccaaaaccccctagaactgataaaataattcagcaaagtttctggatacaaaattaacgtacaccaatgagttgctttcttacataccagcaatgaccaagctgagaataaaatcaagaactcaaccccttttacaatagctgcaaaaaacaaaacaaaacaaaacaaaaacttaggaatatatacctaaccaaggaggtgaaagacatctacaaggaaaactacaaaacacggctgaaagtaatcatataagacacaaacaaatggaaacacatgccattctcatagatgggtagaatcaatattgtgaaaatggccataatgccagaagcaacctacaaattcattgcaattcccatcaaaataccaccattagtcttcacagaactagaaaaaacaatcctaaaattcttatggaaccaaaaaagagcccaataaacaagcaagtctaaaaaaaagaacaaatctgaaggcattacattacctcatttcaaactatacaataaggccatagtcaccaaaacagcatgatgctggtgtacaaataggcacatcgaccaatggaacagaatagagaacccagaaataaactcaaatacttacatccaactgatctttgacaaagcaaacaaaaacataaagtggggaaagggcaccctattcaacaaatggtgcggggatagctggcaagctacatgtaggagaatgaaactggatcttcatctctcaccttatacaaaaatcaactcaagatggatcaaggacttaaatctaagccctgaaactgtaacaattctagaaaataacatcggaaaaacccttctacacattggcttaggaaaggatttcatgaccaagaacacaaatgcaaatacataaaaacaaagaaaatatctgggactaaattaaactaaagagcttttgcatggcaaaaggaagagtctgcagaataaacagacaacccacagagtgggagaaaatcttcacaatctatacatctgacaaaagaataatatccaggctctaaaatgaacacaaatagattatcaagaaaataacaaacaatcccaataaaaagtaggctaaggacatgaacagacaattctcagaaaaagatatacaaatgaccaacaaacatatgaaaaaattctcaacatcactaatgatcagggaaatgcaaatcaaaactacaatgagatatctacttactctagttaaaacggctattaacaaaaaagacaaaaaataacagatccttgtgaggatatggagaaaagggaactctttcttacacactgttggtgggaatgtaaaatagtacaaccattatggaaaacagtatgaagatttctcagtaaactaaaaacagaactatcatacaatccagcaatctcactagtggttatttatccaaaagaaaggaaatcagtatatccaatggacacattacactcatgtttattgaagcactattcacaatagttaaggtttgggatcaacctaagtgtctatcaacagatgaacggattaaaaaattgtatttttgcacagtactattttgccatgaaaaagaatgaaatcttgtcatttgtagcaacatggatggaaccagaggtcattatgttaattgaaagccctgaagcagaacaaaaacaaactcttggtatgccaaagagatagataataaaataagccagatacagaaagtcaaatatcacatgtttttattcatctgtgggagctaaaaaagtgggtctcatggtggtagagagtagaatgatagttatcagaggctggaaaaagtgtgagtgtgtatgggaggggatttaagagatgttggttaataggtacaaacacagttggatagaaggattaagccataatgtttgatatttgagtagggtgactatagttaattactatttattatatatttcaaaatggctagaaatgaggatttgaaattttctcaatacatagaaatgataaatgctcaaagcaatggatatcctaaatatctagacttaatcatcacatgttctaggcatgtaagtatcacatgtaccccataaatatataaaaatatgtatcaaaaaatgcacattgctcccatttgttgactgactaggtgaaaatatttagtgccatgaataatccctgtttactctgtttatgggcatattgaaaggttataaggctcagagagaccagtattgttgatagcctgcaactacaataattatttgtctctctcccatattctggatatatacagccaaattcaaaagtaattcacaggaaaaagtctgatcaatgtgagagcactataaaattactaataaagttatatttgccaaaatatggcactctaacttggaaaatgcaaaggttccttgatatgaaagacacaagacctgaaggtcaaaactccctgaccaatctagcacttcctaaaaagtaaatctgttaatatccctctacccttcacacatgagagtcaccaggtcagtgcatggtttcctcctgttatcttcaccagtctgggagctttcagtcatttatcacctccttcttccttctcatctcccacagtcagtcgaatactatgtctttctcaccccacctttgtccatccttcaaattccacagactcactgctcctcttgggtttgaaccattgtatctgtccccttgaatcatcatccatattttattttatctgcaaacttgaatccattttgtgcacataagcagattactttttcccaaaatcttatttcctgagtcacttaacatcctaatgcttatcgtttagtattgcaatagcatagtaaaagcttgtatttttgtagccaggccctgtactatctggtctttcctagtcctctacgtatgtcttactctcccttctacttccagagagccagtttcatgcaagtcacgaagccctagcttgctggttttagaatttaagcctttattagtattctatctcccacggaaagtcttcatcacactctccaaaaactttcccactcaggtcctaactctaactttattttagtgcatgttacattctatcagaagataatgcacaatgatatcatgtgtcttagcttcagctaacccatgaaataatggaatccttcatggaaagagcaggctattgttgatacacactcatcttatctccaaatcaatttcataaaacatgtgacaagctagctacttcaaaatgtaaataagagtaaattaaaatagtaattctagcctatatcttggatatctatgaagttttgttttgttttgtttttgtttttaatgaaaagtgacatgtaccacaaatctgctttctcaggtaccactaacagctccttctttccccggtgcagtaaaaactgcctaggagtctctgtccacttaattaaccattttcccaccccgataaagatttttctccatcatatcatcctccttggaatcctggaattctcccataacatccacattaattttacaagcccccatacatttcttaaggaagctcttggttcttcctatgtttctctccatccctcagcccatgaacactttttccttttaacacaagagtaaaagatggagaagataaaattgcaatttttgattactgaagaaaatgtactttattaaacagaaggctttctctcaaggccaagcccagtccccatgtgcagaaggagggtgtcagggtcacaggaacacctgcaaactggaagagaactcagtggtacttatgggccagggcaatggcgacagcagacaccagcttctgccaggcagcctgcacttcaggggtgaactccttgccaaagtgagtagccagaataatcaccatcacgttacccaggagctgttaggcaaaagacaaaataacacacaggcatgttgagtagaagtttccgaaaacaacttgatgaaaaaacaaacaaacaaacaaaaacggctttatacctacattcctagacaaccctgacctcaaactgttccaaggtttgtgcccacccaaaaaattcagatgagcttaggttcaattttattctatgagccctacattcaacattctacctacctacaccctcacccccttccccattttaccagtattattgggttccctctctccctgtttttctttaagcaattgtctaatttttgtaaatgtagaatgtgagtgctgcaagagttctcagcgggagtttaaaatccccaacaaattcggaaacaagccttcacttggtcacaatactgatgggaaatttaacatattttagaaaatgtgtcttatttttctttgagcaaatcttttattttttttgcaaaaatctctttctaaacctcaattatcatgacccacataaaataaggcatttctatttccttgaaatggactttcatctaccaaaagccaaatttcattcttctttcacaagtctacaattctataatacaattctctgggataaacacatcaagttctggcaagatttcctgaaaagttaagccaattcaggctgttagtagtcctttactgtcactagttctgaatcatgtaagttttggttatgctcactagaagtctgctgttctaacatcaagctcgacccatgatttctgagatctttgttggtctttccaataagattatgagcttcaattaatgtcaaaatataaagccaaaaaatcacatcaccagcacctgaactcaccttgaagttctcaggatccacatgcagcttgtcacagtgcagctcactcagcttagcaaaggcgggcttgaggttgtccatgtttttaatagcatctccaaaggaagtcagcaccttcttgccatgggccttgaccttggggttgcccaggatggcagagggagacgacaggtttccaaagctgtcaaaaaatctctgggtccaggggtaaacaacgaggagtctatgaaatgacaccatatcagatacaaaattagagatgcaaaaaatcttgaggactttcccaatcaacttgctagggtaatattcacccttcattcccatgcattgagaaccaatgcttacctgcccaaggcttcacctccagcctcttccacattcatcttgctccacaggctagtgacggcagccttctcctcagcagtaaaatgcaccatgatgccaggcctgagagcttgctagtgattgcagctgtgtcggaagcagatatgtgctgctgcctctctgtctggccttttattctttactgccgaagttctggccccctgttctccatggtacttaaaagtcattggtcaaggctgacctgtgtccctcaggggtggagtcaggtccggagagggtcagcagtgatggatggacactaagtttgtgataatgtgtgctggatcctgaggctcttttttgttggctcctcatctatctgcaacacaaatttccatttgtccccttttttaccctcttcatcatcttccaaaatgatatccatctctcccattctccttttccaagaaagcctcatataaaggagcaaatctcaaaataggaaaaaaagtttcagccaaagcgcatttaacatttgccttaaaggtggtgacagtgacaaaaacagggccaaggaaaagaaaataaagctgttaaaacagaatctcacccagttctagctctcttaaggagtgcattgtaaacaaaacttctgtaccttagtttctctagggagacaaaaaccgtacatagttccttctagaaactgaacagaatagcaagtagtccacagtgggactaaagccttaatcccaaagtacagtaccttggggtgattccctagagaggacagacagaaaagattacatccagtgcttccagagaatcctctctcttttcatttctctatgaccacaggggacattggctactttgtgagtattgcctggggctctcttcttgcttgcctgtctgtcctgcttatacttctcactgggaagggagctgagaagcctaaaatcctaaaattatttaaagccagaatttgtcatcaaacagagaaaaaagtgaatcgatatattaatcaggctaggagtcagggtatattattcctctagtgtccttttttttttctgtatgtccccattttgatgacttgctagctctttacttggtagagctgaaactggaagttgggatttacagtgtattcaattcgatccatgtgcctgaagaatattgctcatgctatatcacttaatctgcccttataataccattgtcattatcctcatattttagaatcaaggaataaattcacagaaattatttaactatcaatgtgacagaagtaatgattgggggaataatagaagcagagttccacaaattccagcattgttaattctataaaagtcccttacatcaccataatctcattgccccagcccagttcctccttctggcttgttctacatccatttattttttcttttttctttttcttttctttctttcttttttttttttttttgagacggagtctcactctgttgccagactggagtgcaatggcactatctcagctcactgcaaccttcgcctcctgggttcaaacgattctcctgcctcagcctcccgagcagctgggactacaggcgcatgccaccatgcccagctaatttttttatttttagtagagacgggatttcaccatgtttgccaggatggtctcgatctcttgacctcatgatctgcccacctctgcctccgtctccatccatttctaccatttctttctcctatggctccccttgccccaccagatctaggaatttctgttcctacaatttcctgtatgttcaggccctagaggttcttcgtctttttcacttagcagtatggctcctgtctcccaagtcaagtgcctttggggattccatattccaagtttactaagagcgtttctctcttctataacctgactttgttatttattatattttcttatgtttgtgataaaaaaaaaaaaaaaaaaaaacacttgtggcaagtaagaatgtctcccttgcttttctcccatgattccagaagtcttcacctgacttaatgactgcccaaattgttattattccaggccactgaatttctactccattttcttttagctattaaccaatggtatctttctgagcatatattctaaccattggctaacacagacaaaaccaggaattcctaaactttttttgtgtcacaggccagtttggcagactgtaagtgctaaaaaaatatgtttttattgcatcaaataatatacataggagtgctaagtttaattacactgaaatatcattatcagacatcaaacattacatttgtggtatagtatttattatatttgcttctttatgaaagcattagatctaggattgggtctacagctaccttaagatccaagtagtgatgcagataaatgtgaattaaaaatatctgcaatgggccaggcgtggtggctcacacctataatcccagcacttcaggaggccaaggcgggcagatcatctgaggtcaggagttcaagaccagcctggccaacatggcgaaaccccatctctactaaaaatacaaaaattagactggcatggtggcaggtgcctgtaatccccagctactcaggaggccaaggcaggagaattgcttgaatgcaggaaggggaggttgcagtgagccgaaatcatgccactgcactccagcctgggcaataagagcgaaactccatctcaaacaaaaacaaaaacaaaaagatctgcaatacctatggtgtagtatgaaaatatctgtggtttctctttataactatgcaataggtactgatgatgtcattctagtttgtcctttgcattcaaagtagaagaaaatgctaaatttcagttacatgtaagtaaaaatacagattttttttctataaacttcaccagccccctagtgttctgtggaccccagattaagacttcctgggacaaaatatatagcctaggaagacaagatcctaggtttggaaagaacgtatttgatccactgaaataaaagaacaatgactagacaaaaagcagctcagctgcttgtagcttgaaccaagctgagcttggctactcagagaagaacagtcgttgagataatataattttttttaaccaattaagatacagctctgggttttcagggggaatttgctacagatccacagtatgaaggcagtggcccttcctcagaacttgaatgtgagggtcagacattgccaaagtccaaggaataaggaccaggtatctcaaggccaagagtttggagaacaggtttctccctaaaacaagccctatgggtaatcccatcattcttcccattcagagtatggacaccagtcttctcttagattcagagtatggggttgatcctctcctgctccctcggagccagttgcagagcccacattttcttctctccttactgcctatggttccagacctggcttgcatccagggatctgacccattccatgtttccttatggctaaaggtggtagggaggagcttcaagaaaggttatagcattgaaaggcccaggtttgtgtctcagtaacaaggcttataaatcctgactcagaagtcaggtaggctgcgggcagtctcattattgcttcgatgcttgttggttcaagataaattgcttcacctgctcatttttaagcattttatttgtttatcatatgagataccatgaaaaatggattattgcttttctttcctatattaaaagcccaaagttcagagagataagtgttatggccatccaggatagatcagaaagattagacagtcagaaaaagtaatcagtaagaatattcatttattgtctatataattaaaattagtaaaataaaatctatgtatgtcttaagacatttaagtataaaggacttttagaaagaaacacccaaattcgatgaagattaattcctgcctgtttgggtttgctttagcatttgtaatttcttaagttctatgcaggattctaaaaactgtaagatgcctaatttaaacaaggaaacatccaatattttcttaaatctttctggctaatttatgacatatgtttaacctgaagagtcaaatattgtactgttcttagatgctattagtatgaaaaattatataaattagattcttgttaagtaaagtaggcccttcacttcactgaatgtttttcatggtattatctaagaaataaatactttaatgaatattctttaccacaaataacttactttatttttatttttaaaataggaaaaatataaacaaggcttgtaaaccactgataggaaaagagctgcttaggattctaaattagccagattttaaattattctgcttccattatgtatctaaatctatattctcagaacaaaaatagatgtaagcaaatgattctactagattttgtgttagattttgcattatccaggaatgacttggatatcacaagtcataaattctgtggctgccttgcaggaagcctgtggctattttctagtgtaattgtaaagaatgagagaatagaccataacaagtgttcaaactgttgctttcttgttttcaacttttattttaagttcaggggtacatgtacaggatgtgcaggtttgttacatagataaatgaatgtcaagggggtttgttgtatagatgatctcatcactcaggtattacgcttagcatccattagtgatttttcctgatcctctccttctctcaccctccaccctctgataggccccagtatgcgttgtttccctctatgagtccatgtgttctcatcatttagcttctaactgttgctttcgtagtgtacctctgcctcatctctcacgaagtttgcaggtgagtttgagccagggctgaggctcattctcaagagtaatctctctctctggcaacttggagcacagacatcctattgtgtgactgacctcgggagccactgtgcctaaagtacaaccagagttacttgtgaatgttaattaagcaggagggatctttaatgggaaaaaggagtagaaagccagaatcagccagttatgccacactttcctacatgatgggcactgaaggttaaaacttgagtctgtcaacttagaaaactcataaatatcccattttccgctgaaatatagctttactttcctggtttctttgaccttttgggaccttgagtaagtaaagatgccttcatttattttcatgattaaaattctaagaaattcttgggtttttttaattaaattgcattgcctaatgtatttatgaactaagaacatagaaataaaacaatactctgaagtagttcagaatgtgctttcaatttatataaagagttaattcaaatgagactattttaagtgcagggctttgaatcttatgtctagaaattttgaaaaacctctgattatatgctaagattccacctctagtgctagaactgagaagtccttgacttggtgatcttttttaaattctgaaacaacagcaacataaagctaaggactttttcttgcctatgcatgctatcttcagtactttgattatttagtattgaaactataacatagtatgtttcctgaataaaaaatgtgtatttctctggagaaggttaaaactgaggattggcaagtgagcaaggcttaaatggaagaagcaatgatctcgtcagaccaccttcattaacgagatcatccatcatgaggaaatatggaaaaccaggccccctctgttttgtgtcactaagggtgaggatgctgaatgatttttccctcccccgggcttcttttagccatcaataattctagccccacaggagtttgttctgaaagtaaacttccacaaccgcaagcttattgaggctaaggcatctgtgaaggaaagaaacatctcctctaaaccactatgctgctagagcctcttttctgtactcaagcctcattcagacactagtgtcaccagtctcctcatatacctattgtattttcttcttcttgctggtttagtcatgttttctgggagcttaggggcttattttattttgttttgttttctaatcaacagagatgggcaaacccattatttttttctttagacttgggatggtgatagctgggcagcgtcagaaactgtgtgtggatatagataagagctcaggactatgctgagctgtgatgagggaggggcctagctaaaggcagtgagagtcagaatgctcctgctattgccttctcagtccccacgcttggtttctacacaagtagatacatagaaaaggctataggttagtgtttgagagtcctgcatgattagttgctcagaaatgcccgataaatatgttatgtgtgtttatgtatatatatgttttatatatatatatatgtgtgtgtgtgtgtgtgtgtgtgttgtgtttacaaatatgtgattatcatcaaaacgtgagggctaaagtgaccagataacttgcaagtcctaggataccaggaaaataaattacattccaaaaatttaactgagactttaaaaaaaaaaaaaaaacaaaaaaaaaccagtgatccatggacacagggaggggaacatcacacactggggcctgttgggggtggggggctaggggaaggatagcattaggagaaatacctaatgtagatgacgggttgatgggtgcagcaaaccaccatggcacatgtaccccagaacttaaagcatattaaaaaaacagtgatcataaaagaagctcaaatttaactataagagacggaatggctcccacaattcttaactataatcttacagaatattctcattgaatagaagtatgcttatcattagagatttggacagccaggaaagcacagaaaaaaaaaaaaggagctctgttgccttatagcctagaggtgttttgaacctcacataacactgatgtccaggccaaggccatccttcccatgaagatggatgaataagccatatctgacacctatgaaataatgtttactttagtggcatattgcattaggctacctgccttggcacagtttttctttacttttacctgactgatgaaacaattaattgcttacataaacatgagtgctctagttataaattccagtgtaaaaaacaccctggtttcgatattcatcttttgagccttttattttggtcagaacaagttttcaagagcaaatctcagcctacaaaacaaatgagtccaattctagaactcagtaatcccatcaaggctctgcctgcggagggctaactagctctatgcaggcttagcacttccagctctactccactgatttctttgtgtgtgcatagcagtggatgtgtcagcatacatccttttaattatagttgtatatgtgtttgactgctcattcattcattcaaaattgtaaaattgctaagaatacagcacaaaaacagaatagaggaataaagttcctgttttcatggacttgatagtggaaagagcttgacattaaataagcaaatgaaacatgttatataccaatgagattaggtgctatggagaaaaaaaaaaaactgaaatgaaggccagagtgtgattaggacagggtgaaagggtatcgctactttaagtagtatggcaggaaagtcctcactataaagttaacacctgagagagtacccatagatgatgaggaacccatttatatgaaactatgattaaatatttagggcatagggaatggcaaatgtaaataccctaaagatgtaagatgcttagaattttcaaggaatatcaataaggccaatgtaggatgagattcggtgaaggggagaataaaagatgagatcatagaagtcctaaattataaaatttgggacactaataatacctacatcatagagttgtaagaaaaaacactctacacacatacacataaatatatatatttatttatatgagagctatatatatgtatctgtaataaacataatatatgcatgaacaactattgtagagaattgtaaggatttggttttattataaatgatataggaaactatcagaagactttgaacaaagaggtgaccatatatgacttacattttgaaaagactaatttggatagtatattgggaagaaattgtagtggggcagtggtagaagcaggaagattgttatgagtcaacagctataatttaggtggtggtgacagtgacttagaccagagtggtagcattggaggtgaaggcaaggggtcagcctctgaaaacatcctttcacgaaaaaccaacaggattttctgacagagaatatggaattggtgtgtgtgtgtgttgcactcatgcacactctagtgcatgctaatttctggctgtgagtatatgtcagagtaaggattttgaagctaggcaaagtgagtctttgggttgaattttgtcaaggtgtttgttcatcacagtctctacctcagaattggctttaaaattggaaagctgggtgggtggatatggaaatgagaaaccatctctggagcttgtctacacatcatacctttagccaaagtgacatcaagtatttcttggatgctgaccagaggcttctgagccaggcccctctagctgaaggaagttcacagtttctttaaggagggaaaatggtagataagtcagagaacaatcagacagaattctgttcggtcagggaatttgatgggttttgtttgtttgtttgtttgtttgttttcgtttttctttagacagagtctcgctctggaggctggagtgcaatggcatgatctctgctcagtgcaaactccacctccccggttcaagcgattctcctgcctcagcctcccaagtagttggattacaggctcccgtcaccacgtccagctaatttttatatttttaagcagagaccaggtttcactatgttggctgggctggtgtccaactcctgacctcaagtgatctgcccaccttggcgtcccaaactgctgtgattacaggagtgagccaccgcacctcaaggaatttgatgtttaggctgtgacctctgcactaggaatggaaggttagccactcccaccccacccttcgtcctgcaagtacccaatcacactgcagagccacacctgccttccttagaggcgtgcctccatccctgatgagtttttcctccatgtgtagaattgaataagaaggatagaattcaatttaacaagctttgagtacttcctatagcctaggcattgtgctgacaactatgttagagagagaaatagacaagctataaacttttcctcaggaccatctacataatttctaggcccaatataaaatgaaaatgaatagcccctttgtcaaaaattaaggatttcatgtcaggaacagcaaggatgttaaaccaagcatggggccatcaagctatatctgctattcatgatacgaaaaaataaagagtattctagttatttagccacatatttcaagtttagtctgatatcaccctttaaacactgccactcaacctaaaacaatgctagtctttctagacccatccatggaattttttccccactgttttttttctaattaatttgtgatttaaatggctcatattccagcctgtgccacagttattacacatttaactcactctctgtattttgttatctgtataaatactcttcaggttgatttcctttcttaatgtttgtgtttatgttagatatgcatcatgtagcctgtcttcatttctatcacaaacatacacttgaaccaaaaaggaagtttttacatagcatcactaaatcttctctctgtgctcttagcgaaaccaagtaggctgacaagacatcattcattcacagcgaaaccgagtagactgacaagaggtcattcattcacaaatgaatacaaaaaacagtgtcaagtatacgtgaggtcctgtaatgggtcctgggcctgcaaaaccctcacagctgctaacctcaagaagctcagtggagacataacattcatctgaaaattccttgcatgtctgttgaactaatttatctgcctctccttaaatttgttcctttttgtatagttccttaagtcatgtcacatttctgaaacatctttgccactgtgaactcctacagaagccagcttcaaagccattcttctggaagccttctctatccccttgacctcctgttttttctcccacaagcattatgtctgtctgtcattgtttttcatcctcttgtagtccttcacagttacccacacaggtgaacccttttagctctcctggaggaatgtttctttcctctcaggatcagagttgcctacatcttcctaatgcaccaagactggcctgagatgtatccttaagatgagagcttcccagtagcaccccaagtcagatctgaccccgtatgtgagcatgtgtcctctaacagcacaggccttttgccacctagctgtccaggggtgccttaaaatggcaaacaaggtttgttttcttttcctgttttcatgccttcctcttccatatccttgtttcatattaatacatgtgtatagatcctaaaaatctatacacatgtattaataaagcctgattctgccgcttctaggtatagaggccacctgcaagataaatatttgattcacaataactaatcattctatggcaattgataacaacaaatatatatatatatatatatatacgtatatgtgtatatatatatatatattcaggaaataatatattctagaatatgtcacattctgtctcaggcatccattttctttatgatgccgtttgaggtggagttttagtcaggtggtcagcttctccttttttttgccatctgccctgtaagcatcctgctggggacccagataggagtcatcactctaggctgagaacatctgggcacacaccctaagcctcagcatgactcatcatgactcagcattgctgtgcttgagccagaaggtttgcttagaaggttacacagaaccagaaggcgggggtggggcactgaccccgacaggggcctggccagaactgctcatgcttggactatgggaggtcactaatggagacacacagaaatgtaacaggaactaaggaaaaactgaagcttatttaatcagagatgaggatgctggaagggatagagggagctgagcttgtaaaaagtatagtaatcattcagcaaatggttttgaagcacctgctggatgctaaacactattttcagtgcttgaatcataaataagaataaaacatgtatcttattccccacaagagtccaagtaaaaaataacagttaattataatgtgctctgtcccccaggctggagtgcagtggcacgatctcagctcactgcaacctccgcctcccgggttcaagcaattctcctgcctcagccaccctaatagctgggattacaggtgcacaccaccatgccaggctaatttttgtactttttgtagaggcagggtatcaccatgttgtccaagatggtcttgaactcctgagctccaagcagtccacccacctcagcctcccaaagtgctgggattacaggtgtgagacaccatgcccagattttccatatttaatagaggtatttatgggatgggggaaaagaatgtttctctcactgtggattattttagagagtggagaatggtcaagatttttttaaaaattaagaaaacataagttggaccttgagaaatgaaaatttatttttttgttggaggatacccattctctatctcccatcagggcaagctgtaaggaactggctaagacacagtgagacagagtgacttagtcttagaggccccactggtacccagatgagaaggcaccttcatcactcatcacagtcagctctgcctttctcctctctcctttctcatcagaaatttcataagtctactagggtcaggcagatcacataagaaaagaggatgccagttaaggtctgcagtgagtatgagcccatccctgatgaattaaggcaatcaacactttaggcagccatgttgccatgagagattaggaggggccaaatgagcccagaaataccacctacttcttagatgatcttgagcaagttgcttaacttcttgaagtctctgaaatataggatgataatatgtattagctaatagaattatgaggatgagattagtttattgtgtaaagaactagggacacagtatatattcagtaagtgttttctgttacagtattatgataaatatatacatgcaactattacagttgcatgctaccttaaagaataattggaggtacagttattcgga

SEQ ID NO: 511 - DNA, 25586 bp, Homo sapiens
aaaaagtcagtggtagcttgatggggatagcattgaatctataaattactttgggcagtatggccattttaaagatattgattctttctatctatgagcatggaatgtttttccatttgtttgtgtcctctcttatttccttgagcagtgagtggtttgtagctctccttgaagaggttcttcacatcccttagaagttgtatttctaggtattttattttattctctttgcagcaattgtgaatgggagttcacccatgatttggctctctgcttgtctattattggtgtataggaacgcttgtgatttctgcacactgattttgtatcttgagactttgctgaagctgtttatcagcttaagattttgggctgagatgacagggtcttctaaatatacaatcatgtcatctgcaaacagagacaatttgacttcctctcttcctatttgaatatgctttatttctttctcttgcctgattgtcctggcgagaacttccaatactatgttgagtaagagtggcgagagggcatccttgtcttgtgccggttttcaaagcaaatgatttttaaatttccatcttgatttcattgttgacccaatgatcattcaggagcaggttatttaatttccctgtatttgcatggttttgaaggttccttttgtagttgatttccaattttattctactgtggtctgagagagtgcttgatataatttcaatttttaaaaatttattgaggcttgttttgtggcatatcatatggcctatcttggagaaagttccatgtgctgatgaatagaatgtgtattctgcagttgttgggtagaatgtcctgtaaatatctgttaagtccatttgttctttaaatccattgtttctttgtagactgtcttgatgacctgcctagtgcagtcagtggagtattgaagtcccccactattattatgttgctgtctagtctagtagtaattgttttataaatttgggatctccagtattagatgcatatatattaagaattgtaatattctcccattggacaagggcttttatcattatatgatgtccctctttgtcttttttaactgctgtttctttaaagtttgttttgtctgacataagaatagctgctttggctcgcttttggtgtccatttgtgtggaatgtcattttccacccctttaccttaagtttatgtgagtccttatgtgttaggtgagtctcctgaaggcggcagataactggttggtgaattcttattcattctgcaattctgtatcttttaagtggagcatttagtccatttacattcaacatcagtattgaggtgtgaggtactattccattcttcgtggtatttgttgcctgtgtatctttttatctgtatttttgttgtatatgtcctatgggatttatgctttaaagaggttctgttttgatgtgcttccagggtttatttcaagatttagagctccttttatcagttcttgtagtgttggcttggtagtgccgaattctctcagcatttgtttttctgaaaaacactgtgtattttcttcatttgtgaagcttagtttcactggatataaaattcttggctgataattgttttgtttaagaaggctgaagatagggccatattcacttctagcttttacggtttctgctgagaaatctgctgttaatctgataggttttctttcataggttacctggtagtttcacctcacagctcttaagattctctttgtctttagataactttggatactctgatgacaatgtacctaggcaatgatatttttgcaatgaatttcccaggtgtttattgagcttcttgtatttggatatctaggtctctagcaaggtgggggaagttttccttgattatttccctggataagttttccaaacttttagatttctcttctttctcaggaatgctgattattcttaggtttgattgtttaacataatcccagatttcttggaggctttgttcatattttcttattcttttttctttgtctttgttggattgggttaattcaaaaactttgtcttcaagctctgaatttcttctgcttggattctattgctgagactttctagagcattttgcatttctataagtgcatccattcatccattgtttcctgaagttttgaatgttttttatttatgctatctctttaactgaagatttctcccctcatttcttgtatcatatttttggtttttttaaaattggacttcaccttcctcggatgcctccttgattagcttaataactgaccttctgaattatttttcaggtaaatcagggatttcttcttggtttggatgcattgctggtgagctagtatgattttttggggggtgttaaagaaccttgtttttcatattaccagagttagttttctggttccttctcacttgggtaggctctgtcagagggaaagtctaggcctcaaggctgagacttttgtcccatgaggtgttcccttgatgtagcacagtcccccttttcctaggcgtggggcttcctgagagccgaactgtagtgattgttatctctcttctggatctagccacccatcaggtctaccagactccaggctggtactggggtttgtctgcacagagtcttgtgacgtgaaccatctgtgggtctctcagccatagatacaaccacctgctccaatggaggtggcagaggatgaaatggactctgtgagggtccttacttttggttgttcaatgcactatttttgtgctggttggcctcctgccaggaggtggcactttctagaaagcatcagcagaggcagtcaggtggtggtggctgggggggctggggcaccctagaactcccaagaatatatgccctttgtcttcagctaccagggtgagtaaggaaggaccatcaggtgggggcaggactagtcgtgtctgagctcagagtctccttgggcaggtctttctgtggctactgtgggaggatgggggtgtagtttccaggtcaatggatttatgttcctaggacaattatggctgcctctgctgtgtcatgcaggtcatcaggaaagtgggggaaagcaagcagtcacgtgacttgcccagctcccatgcaactcaaaaggttggtctcacttccagcgtgcaccctcccccgcaacagcaccgaatctgtttccatgcagtcagtgagcaaggctgagaacttgccccaggctaccagctgcgaaaccaagtagggctgtcctacttccctgccagtggagtctgcacaccaaattcatgtccccccaccaacccccccactgcccagcccctagatctggccaggtggagattttctttttcctgtcatcttttcccagttcctctggcagccctcccaaatgacccctgtgaggcaaggcagaaatggcttcctaggggacccagagagcccacagggcttttcccgctgcttcctctacccctgtattttgcttggccctctaaattgactcagctccaggtaaggtcagaatcttctcctgtggtctagatcttcaggttccccagtgaggatgtgtgtttgggggtagacggtcccccttttccacttccacagtttgggcactcacaatatttggggtgtttcccgggtcctgcaggagcaatctgcttctttcagagggtgtgtgcgttctctcagctttcttgatttatttctgcaggtggttctgcaaaaaaaattcctgatgggagacttcacatgctgctctgtgcatccgagtgggagctgcaatgtacttctgctgcctcccatctgccatcaccctctaatttgtcggtaatatgcatttttaatcaatctttttttctctctctctctttttcttctcccccaaaactatactgccctttgatatcaaggaatcaaggacgtgatgttgaggggtgggcagtggatacactctttaccccttagggagctatatctagatttagatattgccaattcaagataacttaattgaaagcaaattcataatgaatacacacacacacacacacatctgcatgacaagatttttaatagttgaaagaataactaataattgtccacaggcaataagggctttttaagcaaaacagttgtgataaacaggtcattcttagaatagtaatccagccaatagtacaggttgcttagagattatgtcattaccagagttaaaattctataatggcttctcactccctaccactgaggacaagtttatgtccttaggtttatgcttccctgaaacaataccacctgctattctccactttacatatcaacggcactggttctttatctaactctctggcacagcaggagtttgttttcttctgcttcagagctttgaatttactatttcagcttctaaactttatttggcaatgccttcccatggcagattccttctgtcattttgcctctgttcgaatactttctccttaatttcattcttagttaataatatctgaaattattttgttgtttaacttaattattaattttatgtatgttctacctagattataatcttcagaggaaagttttattctctgacttatttaacttaaatgcccactactttaaaaattatgacatttatttaacagatatttgctgaacaaatgtttgaaaatacatgggaaagaatgcttgaaaacacttgaaattgcttgtgtaaagaaacagttttatcagttaggatttaatcaatgtcagaagcaatgatataggaaaaatcgaggaataagacagttatggataaggagaaatcaacaaactcttaaaagatattgcctcaaaagcataagaggaaataagggtttatacatgacttttagaacactgccttggtttttggataaatggggaagttgtttgaaaacaggagggatcctagatattccttagtctgaggaggagcaattaagattcacttgtttagaggctgggagtggtggctcacgcctgtaatcccagaattttgggaggccaaggcaggcagatcacctgaggtcaagagttcaagaccaacctggccaacatggtgaaatcccatctctacaaaaatacaaaaattagacaggcatgatggcaagtgcctgtaatcccagctacttgggaggctgaggaaggagaattgcttgaacctggaaggcaggagttgcagtgagccgagatcataccactgcactccagcctgggtgacagaacaagactctgtctcaaaaaaaaaaaagagagattcaaaagattcacttgtttaggccttagcgggcttagacaccagtctctgacacattcttaaaggtcaggctctacaaatggaacccaaccagactctcagatatggccaaagatctatacacacccatctcacagatcccctatcttaaagagaccctaatttgggttcacctcagtctctataatctgtaccagcataccaataaaaatctttctcacccatccttagattgagagaagtcacttattattatgtgagtaactggaagatactgataagttgacaaatctttttctttcctttcttattcaacttttattttaacttccaaagaacaagtgcaatatgtgcagctttgttgcgcaggtcaacatgtatctttctggtcttttagccgcctaacactttgagcagatataagccttacacaggattatgaagtctgaaaggattccaccaatattattataattcctatcaacctgataggttaggggaaggtagagctctcctccaataagccagatttccagagtttctgacgtcataatctaccaaggtcatggatcgagttcagagaaaaaacaaaagcaaaaccaaacctaccaaaaaataaaaatcccaaagaaaaaataaagaaaaaaacagcatgaatacttcctgccatgttaagtggccaatatgtcagaaacagcactgagttacagataaagatgtctaaactacagtgacatcccagctgtcacagtgtgtggactattagtcaataaaacagtccctgcctcttaagagttgttttccatgcaaatacatgtcttatgtcttagaataagattccctaagaagtgaacctagcatttatacaagataattaattctaatccatagtatctggtaaagagcattctaccatcatctttaccgagcatagaagagctacaccaaaaccctgggtcatcagccagcacatacacttatccagtgataaatacacatcatcgggtgcctacatacatacctgaatataaaaaaaatacttttgctgagatgaaacaggcgtgatttatttcaaataggtacggataagtagatattgaagtaaggattcagtcttatattatattacataacattaatctattcctgcactgaaactgttgctttataggatttttcactacactaatgagaacttaagagataatggcctaaaaccacagagagtatattcaaagataagtatagcacttcttatttggaaaccaatgcttactaaatgagactaagacgtgtcccatcaaaaatcctggacctatgcctaaaacacatttcacaatccctgaacttttcaaaaattggtacatgctttaactttaaactacaggcctcactggagctacagacaagaaggtgaaaaacggctgacaaaagaagtcctggtatcttctatggtgggagaagaaaactagctaaagggaagaataaattagagaaaaattggaatgactgaatcggaacaaggcaaaggctataaaaaaaattaagcagcagtatcctcttgggggccccttccccacactatctcaatgcaaatatctgtctgaaacggtccctggctaaactccacccatgggttggccagccttgccttgaccaatagccttgacaaggcaaacttgaccaatagtcttagagtatccagtgaggccaggggccggcggctggctagggatgaagaataaaaggaagcacccttcagcagttccacacactcgcttctggaacgtctgaggttatcaataagctcctagtccagacgccatgggtcatttcacagaggaggacaaggctactatcacaagcctgtggggcaaggtgaatgtggaagatgctggaggagaaaccctgggaaggtaggctctggtgaccaggacaagggagggaaggaaggaccctgtgcctggcaaaagtccaggtcgcttctcaggatttgtggcaccttctgactgtcaaactgttcttgtcaatctcacaggctcctggttgtctacccatggacccagaggttctttgacagctttggcaacctgtcctctgcctctgccatcatgggcaaccccaaagtcaaggcacatggcaagaaggtgctgacttccttgggagatgccataaagcacctggatgatctcaagggcacctttgcccagctgagtgaactgcactgtgacaagctgcatgtggatcctgagaacttcaaggtgagtccaggagatgtttcagcactgttgcctttagtctcgaggcaacttagacaactgagtattgatctgagcacagcagggtgtgagctgtttgaagatactggggttgggagtgaagaaactgcagaggactaactgggctgagacccagtggcaatgttttagggcctaaggagtgcctctgaaaatctagatggacaactttgactttgagaaaagagaggtggaaatgaggaaaatgacttttctttattagatttcggtagaaagaactttcacctttcccctatttttgttattcgttttaaaacatctatctggaggcaggacaagtatggtcattaaaaagatgcaggcagaaggcatatattggctcagtcaaagtggggaactttggtggccaaacatacattgctaaggctattcctatatcagctggacacatataaaatgctgctaatgcttcattacaaacttatatcctttaattccagatgggggcaaagtatgtccaggggtgaggaacaattgaaacatttgggctggagtagattttgaaagtcagctctgtgtgtgtgtgtgtgtgtgtgcgcgcgtgtgtttgtgtgtgtgtgagagcgtgtgtttcttttaacgttttcagcctacagcatacagggttcatggtggcaagaagataacaagatttaaattatggccagtgactagtgctgcaagaagaacaactacctgcatttaatgggaaagcaaaatctcaggctttgagggaagttaacataggcttgattctgggtggaagcttggtgtgtagttatctggaggccaggctggagctctcagctcactatgggttcatctttattgtctcctttcatctcaacagctcctgggaaatgtgctggtgaccgttttggcaatccatttcggcaaagaattcacccctgaggtgcaggcttcctggcagaagatggtgactggagtggccagtgccctgtcctccagataccactgagctcactgcccatgatgcagagctttcaaggataggctttattctgcaagcaatcaaataataaatctattctgctaagagatcacacatggttgtcttcagttctttttttatgtctttttaaatatatgagccacaaagggttttatgttgagggatgtgtttatgtgtatttatacatggctatgtgtgtttgtgtcatgtgcacactccacacttttttgtttacgttagatgtgggttttgatgagcaaataaaagaactaggcaataaagaaacttgtacatgggagttctgcaagtgggagtaaaaggtgcaggagaaatctggttggaagaaagacctctataggacaggactcctcagaaacagatgttttggaagagatggggaaaggttcagtgaagggggctgaacccccttccctggattgcagcacagcagcgaggaaggggctcaacgaagaaaaagtgttccaagctttaggaagtcaaggtttaggcagggatagccattctattttattaggggcaatactatttccaacggcatctggcttttctcagcccttgtgaggctctacagggaggttgaggtgttagagatcagagcaggaaacaggtttttctttccacggtaactacaatgaagtgatccttactttactaaggaacttttcattttaagtgttgacgcatgcctaaagaggtgaaattaatcccatacccttaagtctacagactggtcacagcatttcaaggaggagacctcattgtaagcttctagggaggtggggacttaggtgaaggaaatgagccagcagaagctcacaagtcagcatcagcgtgtcatgtctcagcagcagaacagcacggtcagatgaaaatatagtgtgaagaatttgtataacattaattgagaaggcagattcactggagttcttatataattgaaagttaatgcacgttaataagcaagagtttagtttaatgtgatggtgttatgaacttaacgcttgtgtctccagaaaattcacatgctgaatccccaactcccaattggctccatttgtgggggaggctttggaaaagtaatcaggtttagaggagctcatgagagcagatccccatcatagaattattttcctcatcagaagcagagagattagccatttctcttccttctggtgaggacacagtgggaagtcagccacctgcaacccaggaagagagccctgaccaggaaccagcagaaaagtgagaaaaaatcctgttgttgaagtcacccagtctatgctattttgttatagcaccttgcactaagtaaggcagatgaagaaagagaaaaaaataagcttcggtgttcagtggattagaaaccatgtttatctcaggtttacaaatctccacttgtcctctgtgtttcagaataaaataccaactctactactctcatctgtaagatgcaaatagtaagcctgagcccttctgtctaactttgaattctattttttcttcaacgtactttaggcttgtaatgtgtttatatacagtgaaatgtcaagttctttctttatatttctttctttcttttttttcctcagcctcagagttttccacatgcccttcctactttcaggaacttctttctccaaacgtcttctgcctggctccatcaaatcataaaggacccacttcaaatgccatcactcactaccatttcacaattcgcactttctttctttgtcctttttttttttagtaaaacaagtttataaaaaattgaaggaataaatgaatggctacttcataggcagagtagacgcaagggctactggttgccgatttttattgttatttttcaatagtatgctaaacaaggggtagattatttatgctgcccatttttagaccataaaagataacttcctgatgttgccatggcatttttttccttttaattttatttcatttcattttaatttcgaaggtacatgtgcaggatgtgcaggcttgttacatgggtaaatgtgtgtctttctggccttttagccatctgtatcaatgagcagatataagctttacacaggatcatgaaggatgaaagaatttcaccaatattataataatttcaatcaacctgatagcttaggggataaactaatttgaagatacagcttgcctccgataagccagaattccagagcttctggcattataatctagcaaggttagagatcatggatcactttcagagaaaaacaaaaacaaactaaccaaaagcaaaacagaaccaaaaaaccaccataaatacttcctaccctgttaatggtccaatatgtcagaaacagcactgtgttagaaataaagctgtctaaagtacactaatattcgagttataatagtgtgtggactattagtcaataaaaacaacccttgcctctttagagttgttttccatgtacacgcacatcttatgtcttagagtaagattccctgagaagtgaacctagcatttatacaagataattaattctaatccacagtacctgccaaagaacattctaccatcatctttactgagcatagaagagctacgccaaaaccctgggtcatcagccagcacacacacttatccagtggtaaatacacatcatctggtgtatacatacatacctgaatatggaatcaaatatttttctaagatgaaacagtcatgatttatttcaaataggtacggataagtagatattgaggtaagcattaggtcttatattatgtaacactaatctattactgcgctgaaactgtggctttatagaaattgttttcactgcactattgagaaattaagagataatggcaaaagtcacaaagagtatattcaaaaagaagtatagcactttttccttagaaaccactgctaactgaaagagactaagatttgtcccgtcaaaaatcctggacctatgcctaaaacacatttcacaatccctgaacttttcaaaaattggtacatgctttagctttaaactacaggcctcactggagctagagacaagaaggtaaaaaacggctgacaaaagaagtcctggtatcctctatgatgggagaaggaaactagctaaagggaagaataaattagagaaaaactggaatgactgaatcggaacaaggcaaaggctataaaaaaaattagcagtatcctcttgggggccccttccccacactatctcaatgcaaatatctgtctgaaacggtccctggctaaactccacccatgggttggccagccttgccttgaccaatagccttgacaaggcaaacttgaccaatagtcttagagtatccagtgaggccaggggccggcggctggctagggatgaagaataaaaggaagcacccttcagcagttccacacactcgcttctggaacgtctgaggttatcaataagctcctagtccagacgccatgggtcatttcacagaggaggacaaggctactatcacaagcctgtggggcaaggtgaatgtggaagatgctggaggagaaaccctgggaaggtaggctctggtgaccaggacaagggagggaaggaaggaccctgtgcctggcaaaagtccaggtcgcttctcaggatttgtggcaccttctgactgtcaaactgttcttgtcaatctcacaggctcctggttgtctacccatggacccagaggttctttgacagctttggcaacctgtcctctgcctctgccatcatgggcaaccccaaagtcaaggcacatggcaagaaggtgctgacttccttgggagatgccacaaagcacctggatgatctcaagggcacctttgcccagctgagtgaactgcactgtgacaagctgcatgtggatcctgagaacttcaaggtgagtccaggagatgtttcagccctgttgcctttagtctcgaggcaacttagacaacggagtattgatctgagcacagcagggtgtgagctgtttgaagatactggggttgggggtgaagaaactgcagaggactaactgggctgagacccagtggtaatgttttagggcctaaggagtgcctctaaaaatctagatggacaattttgactttgagaaaagagaggtggaaatgaggaaaatgacttttctttattagattccagtagaaagaactttcatctttccctcatttttgttgttttaaaacatctatctggaggcaggacaagtatggtcgttaaaaagatgcaggcagaaggcatatattggctcagtcaaagtggggaactttggtggccaaacatacattgctaaggctattcctatatcagctggacacatataaaatgctgctaatgcttcattacaaacttatatcctttaattccagatgggggcaaagtatgtccaggggtgaggaacaattgaaacatttgggctggagtagattttgaaagtcagctctgtgtgtgtgtgtgtgtgtgcgcgcgcgcgtgtgtgtgtgtgtgtcagcgtgtgtttcttttaacgtcttcagcctacaacatacagggttcatggtggcaagaagatagcaagatttaaattatggccagtgactagtgcttgaaggggaacaactacctgcatttaatgggaaggcaaaatctcaggctttgagggaagttaacataggcttgattctgggtggaagcttggtgtgtagttatctggaggccaggctggagctctcagctcactatgggttcatctttattgtctcctttcatctcaacagctcctgggaaatgtgctggtgaccgttttggcaatccatttcggcaaagaattcacccctgaggtgcaggcttcctggcagaagatggtgactgcagtggccagtgccctgtcctccagataccactgagctcactgcccatgattcagagctttcaaggataggctttattctgcaagcaatacaaataataaatctattctgctgagagatcacacatgattttcttcagctcttttttttacatctttttaaatatatgagccacaaagggtttatattgagggaagtgtgtatgtgtatttctgcatgcctgtttgtgtttgtggtgtgtgcatgctcctcatttatttttatatgagatgtgcattttgatgagcaaataaaagcagtaaagacacttgtacacgggagttctgcaagtgggagtaaatggtgtaggagaaatccggtgggaagaaagacctctataggacaggacttctcagaaacagatgttttggaagagatgggaaaaggttcagtgaagacctgggggctggattgattgcagctgagtagcaaggatggttcttaaggaagggaaagtgttccaagctttaggaattcaaggtttagtcaggtgtagcaattctattttattaggaggaatactatttctaatggcacttagcttttcacagcccttgtggatgcctaagaaagtgaaattaatcccatgccctcaagtgtgcagattggtcacagcatttcaagggagagacctcattgtaagactctgggggaggtggggacttaggtgtaagaaatgaatcagcagaggctcacaagtcagcatgagcatgttatgtctgagaaacagaccagcactgtgagatcaaaatgtagtgggaagaatttgtacaacattaattggaaggcttacttaatggaatttttgtatagttggatgttagtgcatctctataagtaagagtttaatatgatggtgttacggacctaatgtttgtgtctcctcaaaattcacatgctgaatccccaactcccaactgaccttatctgtgggggaggcttttgaaaagtaattaggtttagatgagctcataagagcagatccccatcataaaattattttccttatcagaagcagagagacaagccatttctctttcctcccggtgaggacacagtgagaagtccgccatctgcaatccaggaagagaaccctgaccacgagtcagccttcagaaatgtgagaaaaaactctgttgttgaagccacccagtcttttgtattttgttatagcaccttgcactgagtaaggcagatgaagaaggagaaaaaaataagcttgggttttgagtggactacagaccatgtttatctcaggtttgcaaagctcccctcgtcccctatgtttcagtataaaatacctactctactactctcatctataagacccaaataataagcctgcgcccttctctctaactttgatttctcctatttttacttcaacatgctttactctagccttgtaatgtctttacatacagtgaaatgtaaagttctttattctttttttctttctttcttttttctcctcagcctcagaatttggcacatgcccttccttctttcaggaacttctccaacatctctgcctggctccatcatatcataaaggtcccacttcaaatgcagtcactaccgtttcagaatatgcactttctttcttttttgttttttgttttttttaagtcaaagcaaatttcttgagagagtaaagaaataaacgaatgactactgcataggcagagcagccccgagggccgctggttgttccttttatggttatttcttgatgatatgttaaacaagttttggattatttatgccttctctttttaggccatatagggtaactttctgacattgccatggcatttttcttttaatttaatttactgttaccttaaattcaggggtacacgtacaggatatgcaggtttgttttataggtaaaagtgtgccatggttttaatgggttttttttttcttgtaaagttgtttaagtttcttgtttactctggatattaggcctttgtcagaagaatagattggaaaatctttttcccattctgtagattgtctttcgctctgatggtagtttcttttgctgagcaggagctctttagtttaattagattccattggtcaatttttgcttttgctgcaattgcttttcacgctttcatcatgaaatctgtgcccgtgtttatatcatgaatagtattgccttgatttttttctaggctttttatagtttggggtttttcatttaagtctctaatccatctggagttaattttggataaggtataaggaaggagtccagtttcatttttcagcatatggctagccagttctcccccatcatttattaaattgaaaatcctttccccattgcttgcttttgtcaggtttctaaaagaccagatggttgtaggtacaatatgcagtttcttcaagtcatataataccatctgaaatctcttattaattcatttcttttagtatgtatgctggtctcctctgctcactatagtgagggcaccattagccagagaatctgtctgtctagttcatgtaagattctcagaattaagaaaaatggatggcatatgaatgaaacttcatggatgacatatggaatctaatatgtatttgttgaattaatgcataagatgcaacagagagaagttgacaactgcaatgataacctggtattgatgatataagagtctatagatcacagtagaagcaataatcatggaaaacaattggaaatggggaacagccacaaacaagaaagaatcaatacttccaggaaagtgactgcaggtcacttttcctggagcgggtgagagaaaagtggaagttagcagtaactgctgaattcctggttggctgatggaaagatggggcagctgttcactggtacgcagggttttagatgtatgtacctaaggatatgaggtatggcaatgaacagaaattcttttgggaatgagttttagggccattaaaggacatgacctgaagtttcctctgaggccagtccccacaactcaatataaatgtgtttcctgcatatagtcaaagttgccacttctttttcttcatatcatcgatctctgctcttaaagataatcttggttttgcctcaaactgtttgtcactacaaactttccccatgttcctaagtaaaacaggtaactgcctctcaactatatcaagtagactaaaatattgtgtctctaatatcagaaattcagctttaatatattgggtttaactctttgaaatttagagtctccttgaaatacacatgggggtgatttcctaaactttatttcttgtaaggatttatctcaggggtaacacacaaaccagcatcctgaacctctaagtatgaggacagtaagccttaagaatataaaataaactgttcttctctctgccggtggaagtgtgccctgtctattcctgaaattgcttgtttgagacgcatgagacgtgcagcacatgagacacgtgcagcagcctgtggaatattgtcagtgaagaatgtctttgcctgattagatataaagacaagttaaacacagcattagactatagatcaagcctgtgccagacacaaatgacctaatgcccagcacgggccacggaatctcctatcctcttgcttgaacagagcagcacacttctcccccaacactattagatgttctggcataattttgtagatatgtaggatttgacatggactattgttcaatgattcagaggaaatctcctttgttcagataagtacactgactactaaatggattaaaaaacacagtaataaaacccagttttccccttacttccctagtttgtttcttattctgctttcttccaagttgatgctggatagaggtgtttatttctattctaaaaagtgatgaaattggccgggcgcggtggctcacacctgtaatcccagcactttgggaggctgaggtgggcggatcacgaggtcaggagatcaagaccatcctggctaacatggtgaaaccccatctctactaaaaatacaaaaaattagccagagacagtggcgggtgcctgtagtcccagctactcgggaggctgaggcaggagaatggcgtgaacctgggaggcagagcttgcggtgagcagagatcgcgccactgcacactccagcctgggtgacaaagcgagactccatctcaaaaaaaaaaaaaaaaaaaagaaaaagaaagaaagaaagaaaaaaaaactgatgaaattgtgtattcaatgtagtctcaagagaattgaaaaccaagaaaggctgtggcttcttccacataaagcctggatgaataacaggataacacgttgttacattgtcacaactcctgatccaggaattgatggctaagatattcgtaattcttatccttttcagttgtaacttattcctatttgtcagcattcaggttattagcggctgctggcgaagtccttgagaaataaactgcacactggatggtgggggtagtgtaggaaaatggaggggaaggaagtaaagtttcaaattaagcctgaacagcaaagttcccctgagaaggccacctggattctatcagaaactcgaatgtccatcttgcaaaacttccttgcccaaaccccacccctggagtcacaacccacccttgaccaatagattcattttactgagggaggcaaagggctggtcaatagattcatttcactgggagaggcaaagggctgggggccagagaggagaagtaaaaagccacacatgaagcagcaatgcaggcatgcttctggctcatctgtgatcaccaggaaactcccagatctgacactgtagtgcatttcactgctgacaagaaggctgctgccaccagcctgtgaagcaaggttaaggtgagaaggctggaggtgagattctgggcaggtaggtactggaagccgggacaaggtgcagaaaggcagaaagtgtttctgaaagagggattagcccgttgtcttacatagtctgactttgcacctgctctgtgattatgactatcccacagtctcctggttgtctacccatggacctagaggtactttgaaagttttggatatctgggctctgactgtgcaataatgggcaaccccaaagtcaaggcacatggcaagaaggtgctgatctccttcggaaaagctgttatgctcacggatgacctcaaaggcacctttgctacactgagtgacctgcactgtaacaagctgcacgtggaccctgagaacttcctggtgagtagtaagtacactcacgctttcttctttacccttagatatttgcactatgggtacttttgaaagcagaggtggctttctcttgtgttatgagtcagctatgggatatgatatttcagcagtgggattttgagagttatgttgctgtaaataacataactaaaatttggtagagcaaggactatgaataatggaaggccacttaccatttgatagctctgaaaaacacatcttataaaaaattctggccaaaatcaaactgagtgtttttggatgagggaacagaagttgagatagagaaaataacatctttcctttggtcagcgaaattttctataaaaattaatagtcacttttctgcatagtcctggaggttagaaaaagatcaactgaacaaagtagtgggaagctgttaaaaagaggattgtttccctccgaatgatgatggtatacttttgtacgcatggtacaggattctttgttatgagtgtttgggaaaattgtatgtatgtatgtatgtatgtatgtgatgactggggacttatcctatccattactgttccttgaagtactattatcctactttttaaaaggacgaagtctctaaaaaaaaaatgaaacaatcacaatatgttggggtagtgagttggcatagcaagtaagagaaggataggacacaatgggaggtgcagggctgccagtcatattgaagctgatatctagcccataatggtgagagttgctcaaactctggtgaaaaaggatgtaagtgttatatctatttactgcaagtccagcttgaggccttctattcactatgtaccattttcttttttatcttcactccctccccagctcttaggcaacgtgatattgattgttttggcaacccacttcagcgaggattttaccctacagatacaggcttcttggcagtaactaacaaatgctgtggttaatgctgtagcccacaagaccactgagttccctgtccactatgtttgtacctatggtccactatgtttgtacctatgtcccaaaatctcatctcctttagatgggggaggttggggagaagagcagtatcctgcctgctgattcagttcctgcatgataaaaatagaataaagaaatatgctctctaagaaatatcattgtactctttttctgtctttatattttaccctgattcagccaaaaggacgcactatttctgatggaaatgagaatgttggagaatgggagtttaaggacagagaagatactttcttgcaatcctgcaagaaaagagagaactcgtgggtggatttagtggggtagttactcctaggaaggggaaatcgtctctagaataagacaatgtttttacagaaagggaggtcaatggaggtactctttggaggtgtaagaggattgttggtagtgtgtagaggtatgttaggactcaaattagaagttctgtataggctattatttgtatgaaactcaggatatagctcatttggtgactgcagttcacttctacttattttaaacaacatattttttattatttataatgaagtggggatggggcttcctagagaccaatcaagggccaaaccttgaactttctcttaacgtcttcaatggtattaatagagaattatctctaaggcatgtgaactggctgtcttggttttcatctgtacttcatctgctacctctgtgacctgaaacatatttataattccattaagctgtgcatatgatagatttatcatatgtattttccttaaaggatttttgtaagaactaattgaattgatacctgtaaagtctttatcacactacccaataaataataaatctctttgttcagctctctgtttctataaatatgtacaagttttattgtttttagtggtagtgattttattctctttctatatatatacacacacatgtgtgcattcataaatatatacaatttttatgaataaaaaattattagcaatcaatattgaaaaccactgatttttgtttatgtgagcaaacagcagattaaaaggctgagatttaggaaacagcacgttaagtcaagttgatagaggagaatatggacatttaaaagaggcaggatgatataaaattagggaaactggatgcagagaccagatgaagtaagaaaaatagctatcgttttgagcaaaaatcactgaagtttcttgcatatgagagtgacataataaatagggaaacgtagaaaattgattcacatgtatatatatatatagaactgattagacaaagtctaacttgggtatagtcagaggagcttgctgtaattatattgaggtgatggataaagaactgaagttgatggaaacaatgaagttaagaaaaaaaatcgagtaagagaccattgtggcagtgattgcacagaactggaaaacattgtgaaacagagagtcagagatgacagctaaaatccctgtctgtgaatgaaaagaaggaaatttattgacagaacagcaaatgcctacaagccccctgtttggatctggcaatgaacgtagccattctgtggcaatcacttcaaactcctgtacccaagacccttaggaagtatgtagcaccctcaaacctaaaacctcaaagaaagaggttttagaagatataataccctttcttctccagtttcattaatcccaaaacctctttctcaaagtatttcctctatgtgtccaccccaaagagctcacctcaccatatctcttgagtgggagcacatagataggcggtgctaccatctaacagcttctgaaattcctttgtcatatttttgagtccccactaataacccacaaagcagaataaataccagttgctcatgtacaataatcactcaactgctgtcttgtagcatacattaattaagcacattctttgaataattactgtgtccaaacaatcacactttaaaatctcacacttgtgctatcccttgcccttctgaatgtcactctgtattttaaatgaagagatgagggttgaatttcctgtgttacttattgttcatttctcgatgaggagttttcacattcacctttagtggaaaacacataagtacacatcttacaggaaaaatataccaaactgacatgtagcatgaatgcttgtgcatgtagtcatataaaatcttgtagcaatgtaaacattctctgatatacacatacagatgtgtctatatgtctacacaatttcttatgctccatgaacaaacattccatgcacacataagaacacacactgttacagatgcatacttgagtgcattgacaaaattaccccagtcaatctagagaatttggatttctgcatttgactctgttagctttgtacatgctgttcatttactctgggtgatgtctttccctcattttgccttgtctatcttgtactcatactttaagtcctaacttatatgttatctcaactaagaagctatttttttttaattttaactgggcttaaagccctgtctataaactctgctacaattatgggctctttcttataatatttagtgtttttcctactaatgtacttaatctgctcattgtatattcctaccactaaattttaacctcttttatggtagagacattgtcttgtaaactcttatttccctagtatttggagatgaaaaaaaagattaaattatccaaaattagatctctcttttctacattatgagtattacactatccatagagaagtttgtttgagacctaaactgaggaacctttggttctaaaatgactatgtgatatcttagtatttataggtcatgaggttccttcctctgcctctgctatagtttgattagtcaacaagcatgtgtcatgcatttattcacatcagaatttcatacactaataagacatagtatcagaagtcagtttattagttatatcagttagggtccatcaaggaaaggacaaaccattatcagttactcaacctagaattaaatacagctcttaatagttaattatccttgtattggaagagctaaaatatcaaataaaggacagtgcagaaatctagatgttagtaacatcagaaaacctcttccgccattaggcctagaagggcagaaggagaaaatgtttataccaccagagtccagaaccagagcccataaccagaggtccactggattcagtgagctagtgggtgctccttggagagagccagaactgtctaatgggggcatcaaagtatcagccataaaaaaccataaaaaagactgtctgctgtaggagatccgttcagagagagagagagaccagaaataatcttgcttatgctttccctcagccagtgtttaccattgcagaatgtacatgcgactgaaagggtgaggaaacctgggaaatgtcagttcctcaaatacagagaacactgagggaaggatgagaaataaatgtgaaagcagacatgaatggtaattgacagaaggaaactaggatgtgtccagtaaatgaataattacagtgtgcagtgattattgcaatgattaatgtattgataagataatatgaaaacacagaattcaaacagcagtgaactgagattagaattgtggagagcactggcatttaagaatgtcacacttagaatgtgtctctaggcattgttctgtgcatatatcatctcaatattcattatctgaaaattatgaattaggtacaaagctcaaataatttattttttcaggttagcaagaactttttttttttttttctgagatagagcattgctatggttgcccaggctggagtgcaatggcatgatccaggctcactgcaacatctgcctcccaggttcaagcgattctcctgcctcagcctcccaagtagctggcactacaggcatgtgccaccaccatgcctggctaattttctatttttagtagatagggggtttcaccatgttggtcaggctgatctcgaactcctaacatcaggtgatccaccctcctcggcctctgaaagtgctgggatcacaggcgtgagccaccacacccagccaagaatgtgaattttgtagaaggatataacccatatttctctgaccctagagtccttagtatacctcccataccatgtggctcatcctccttacatacatttcccatctttcaccctaccttttcctttttgtttcagcttttcactgtgtcaaaatctagaaccttatctcctacctgctctgaaaccaacagcaagttgacttccattctaacccacattggcattacactaattaaaatcgatactgagttctaaaatcatcggggattttggggactatgtcttacttcatacttccttgagatttcacattaaatgttggtgttcattaaaggtccttcatttaactttgtattcatcacactcttggattcacagttatatctaaactcttaaatacagcctgtataatcccaattcccaactctgatttctaacctctgacctccaacctcagtgccaaacccatatatcaaacaatgtactgggcttatttatatagatgtcctataggcacctcagactcagcatgggtatttcacttgttatactaaaactgtttctcttccagtgttttccattttagtcattagatagctacttgcccattcaccaaggtcacagattaaaatcatttccctacctctaatcaacagttcgattctgcttcaatttgtccctatctattaatcaccactcttactgcccagtcaggtcctcattgtttcctgaacaagagtagatgctattctttccacttttagaccttatcctggctggatgcggtggctcaggcttgtaaacccagcactttgggaggccaaggcaggcagatcacttgaggtcaggagttcaagaccagcctgaccaacatggtgaaaccccatctctactaaaaatacaaaatcagccgggcgtgtggtgcatgcctgcagtcccagctattcaggtggctgaggcaggagaattgcttgaacccaggaggcagaggttgcggtgagcctagattgcaccattgcactctagcttgggcaatagggatgaaactccatctcagaagagaaaagaaaaaaagaccttattctgttatacaaatcctctcaatgcaatccatatagaataaacatgtaaccagatctcccaatgtgtaaaatcatttcaggtagaacagaattaaagtgaaaagccaagtctttggaattaacagacaaagatcaaataacagtcctcatggccttaagaatttacctaacattttttttagaatcaattttcttatatatgaattggaaacataattcctccctcacaaacacattctaagattttaaggagatattgatgaagtacatcatctgtcatttttaacaggtagtggtagtgattcacacagcacattatgatctgttcttgtatgttctgttccattctgtattcttgacctggttgtattctttctgagctccagatccacatatctaagtacatctttttgcattttacaagagtgcatacaatacaatgtatccaagactgtatttctgattttatcgtaccactaaactcacaaatgtggccctattcttgtgttcacgactgacatcaccgtcatggtccaagtctgataatagaaatggcattgtcactttcttccctactgcaacagaagcccagctatttgtctcccattttctctacttctaaaatacatttcttcactaagtgagaataatcttttaaagacacaaat

SEQ ID NO: 512 - DNA, 25586 bp, Homo sapiens
atttgtgtctttaaaagattattctcacttagtgaagaaatgtattttagaagtagagaaaatgggagacaaatagctgggcttctgttgcagtagggaagaaagtgacaatgccatttctattatcagacttggaccatgacggtgatgtcagtcgtgaacacaagaatagggccacatttgtgagtttagtggtacgataaaatcagaaatacagtcttggatacattgtattgtatgcactcttgtaaaatgcaaaaagatgtacttagatatgtggatctggagctcagaaagaatacaaccaggtcaagaatacagaatggaacagaacatacaagaacagatcataatgtgctgtgtgaatcactaccactacctgttaaaaatgacagatgatgtacttcatcaatatctccttaaaatcttagaatgtgtttgtgagggaggaattatgtttccaattcatatataagaaaattgattctaaaaaaaatgttaggtaaattcttaaggccatgaggactgttatttgatctttgtctgttaattccaaagacttggcttttcactttaattctgttctacctgaaatgattttacacattgggagatctggttacatgtttattctatatggattgcattgagaggatttgtataacagaataaggtctttttttcttttctcttctgagatggagtttcatccctattgcccaagctagagtgcaatggtgcaatctaggctcaccgcaacctctgcctcctgggttcaagcaattctcctgcctcagccacctgaatagctgggactgcaggcatgcaccacacgcccggctgattttgtatttttagtagagatggggtttcaccatgttggtcaggctggtcttgaactcctgacctcaagtgatctgcctgccttggcctcccaaagtgctgggtttacaagcctgagccaccgcatccagccaggataaggtctaaaagtggaaagaatagcatctactcttgttcaggaaacaatgaggacctgactgggcagtaagagtggtgattaatagatagggacaaattgaagcagaatcgaactgttgattagaggtagggaaatgattttaatctgtgaccttggtgaatgggcaagtagctatctaatgactaaaatggaaaacactggaagagaaacagttttagtataacaagtgaaatacccatgctgagtctgaggtgcctataggacatctatataaataagcccagtacattgtttgatatatgggtttggcactgaggttggaggtcagaggttagaaatcagagttgggaattgggattatacaggctgtatttaagagtttagatataactgtgaatccaagagtgtgatgaatacaaagttaaatgaaggacctttaatgaacaccaacatttaatgtgaaatctcaaggaagtatgaagtaagacatagtccccaaaatccccgatgattttagaactcagtatcgattttaattagtgtaatgccaatgtgggttagaatggaagtcaacttgctgttggtttcagagcaggtaggagataaggttctagattttgacacagtgaaaagctgaaacaaaaaggaaaaggtagggtgaaagatgggaaatgtatgtaaggaggatgagccacatggtatgggaggtatactaaggactctagggtcagagaaatatgggttatatccttctacaaaattcacattcttggctgggtgtggtggctcacgcctgtgatcccagcactttcagaggccgaggagggtggatcacctgatgttaggagttcgagatcagcctgaccaacatggtgaaaccccctatctactaaaaatagaaaattagccaggcatggtggtggcacatgcctgtagtgccagctacttgggaggctgaggcaggagaatcgcttgaacctgggaggcagatgttgcagtgagcctggatcatgccattgcactccagcctgggcaaccatagcaatgctctatctcagaaaaaaaaaaaaaaagttcttgctaacctgaaaaaataaattatttgagctttgtacctaattcataattttcagataatgaatattgagatgatatatgcacagaacaatgcctagagacacattctaagtgtgacattcttaaatgccagtgctctccacaattctaatctcagttcactgctgtttgaattctgtgttttcatattatcttatcaatacattaatcattgcaataatcactgcacactgtaattattcatttactggacacatcctagtttccttctgtcaattaccattcatgtctgctttcacatttatttctcatccttccctcagtgttctctgtatttgaggaactgacatttcccaggtttcctcaccctttcagtcgcatgtacattctgcaatggtaaacactggctgagggaaagcataagcaagattatttctggtctctctctctctctgaacggatctcctacagcagacagtcttttttatggttttttatggctgatactttgatgcccccattagacagttctggctctctccaaggagcacccactagctcactgaatccagtggacctctggttatgggctctggttctggactctggtggtataaacattttctccttctgcccttctaggcctaatggcggaagaggttttctgatgttactaacatctagatttctgcactgtcctttatttgatattttagctcttccaatacaaggataattaactattaagagctgtatttaattctaggttgagtaactgataatggtttgtcctttccttgatggaccctaactgatataactaataaactgacttctgatactatgtcttattagtgtatgaaattctgatgtgaataaatgcatgacacatgcttgttgactaatcaaactatagcagaggcagaggaaggaacctcatgacctataaatactaagatatcacatagtcattttagaaccaaaggttcctcagtttaggtctcaaacaaacttctctatggatagtgtaatactcataatgtagaaaagagagatctaattttggataatttaatcttttttttcatctccaaatactagggaaataagagtttacaagacaatgtctctaccataaaagaggttaaaatttagtggtaggaatatacaatgagcagattaagtacattagtaggaaaaacactaaatattataagaaagagcccataattgtagcagagtttatagacagggctttaagcccagttaaaattaaaaaaaaatagcttcttagttgagataacatataagttaggacttaaagtatgagtacaagatagacaaggcaaaatgagggaaagacatcacccagagtaaatgaacagcatgtacaaagctaacagagtcaaatgcagaaatccaaattctctagattgactggggtaattttgtcaatgcactcaagtatgcatctgtaacagtgtgtgttcttatgtgtgcatggaatgtttgttcatggagcataagaaattgtgtagacatatagacacatctgtatgtgtatatcagagaatgtttacattgctacaagattttatatgactacatgcacaagcattcatgctacatgtcagtttggtatatttttcctgtaagatgtgtacttatgtgttttccactaaaggtgaatgtgaaaactcctcatcgagaaatgaacaataagtaacacaggaaattcaaccctcatctcttcatttaaaatacagagtgacattcagaagggcaagggatagcacaagtgtgagattttaaagtgtgattgtttggacacagtaattattcaaagaatgtgcttaattaatgtatgctacaagacagcagttgagtgattattgtacatgagcaactggtatttattctgctttgtgggttattagtggggactcaaaaatatgacaaaggaatttcagaagctgttagatggtagcaccgcctatctatgtgctcccactcaagagatatggtgaggtgagctctttggggtggacacatagaggaaatactttgagaaagaggttttgggattaatgaaactggagaagaaagggtattatatcttctaaaacctctttctttgaggttttaggtttgagggtgctacatacttcctaagggtcttgggtacaggagtttgaagtgattgccacagaatggctacgttcattgccagatccaaacagggggcttgtaggcatttgctgttctgtcaataaatttccttcttttcattcacagacagggattttagctgtcatctctgactctctgtttcacaatgttttccagttctgtgcaatcactgccacaatggtctcttactcgattttttttcttaacttcattgtttccatcaacttcagttctttatccatcacctcaatataattacagcaagctcctctgactatacccaagttagactttgtctaatcagttctatatatatatatacatgtgaatcaattttctacgtttccctatttattatgtcactctcatatgcaagaaacttcagtgatttttgctcaaaacgatagctatttttcttacttcatctggtctctgcatccagtttccctaattttatatcatcctgcctcttttaaatgtccatattctcctctatcaacttgacttaacgtgctgtttcctaaatctcagccttttaatctgctgtttgctcacataaacaaaaatcagtggttttcaatattgattgctaataattttttattcataaaaattgtatatatttatgaatgcacacatgtgtgtgtatatatatagaaagagaataaaatcactaccactaaaaacaataaaacttgtacatatttatagaaacagagagctgaacaaagagatttattatttattgggtagtgtgataaagactttacaggtatcaattcaattagttcttacaaaaatcctttaaggaaaatacatatgataaatctatcatatgcacagcttaatggaattataaatatgtttcaggtcacagaggtagcagatgaagtacagatgaaaaccaagacagccagttcacatgccttagagataattctctattaataccattgaagacgttaagagaaagttcaaggtttggcccttgattggtctctaggaagccccatccccacttcattataaataataaaaaatatgttgtttaaaataagtagaagtgaactgcagtcaccaaatgagctatatcctgagtttcatacaaataatagcctatacagaacttctaatttgagtcctaacatacctctacacactaccaacaatcctcttacacctccaaagagtacctccattgacctccctttctgtaaaaacattgtcttattctagagacgatttccccttcctaggagtaactaccccactaaatccacccacgagttctctcttttcttgcaggattgcaagaaagtatcttctctgtccttaaactcccattctccaacattctcatttccatcagaaatagtgcgtccttttggctgaatcagggtaaaatataaagacagaaaaagagtacaatgatatttcttagagagcatatttctttattctatttttatcatgcaggaactgaatcagcaggcaggatactgctcttctccccaacctcccccatctaaaggagatgagattttgggacataggtacaaacatagtggaccataggtacaaacatagtggacagggaactcagtggtcttgtgggctacagcattaaccacagcatttgttagttactgccaagaagcctgtatctgtagggtaaaatcctcgctgaagtgggttgccaaaacaatcaatatcacgttgcctaagagctggggagggagtgaagataaaaaagaaaatggtacatagtgaatagaaggcctcaagctggacttgcagtaaatagatataacacttacatcctttttcaccagagtttgagcaactctcaccattatgggctagatatcagcttcaatatgactggcagccctgcacctcccattgtgtcctatccttctcttacttgctatgccaactcactaccccaacatattgtgattgtttcattttttttttagagacttcgtccttttaaaaagtaggataatagtacttcaaggaacagtaatggataggataagtccccagtcatcacatacatacatacatacatacatacaattttcccaaacactcataacaaagaatcctgtaccatgcgtacaaaagtataccatcatcattcggagggaaacaatcctctttttaacagcttcccactactttgttcagttgatctttttctaacctccaggactatgcagaaaagtgactattaatttttatagaaaatttcgctgaccaaaggaaagatgttattttctctatctcaacttctgttccctcatccaaaaacactcagtttgattttggccagaattttttataagatgtgtttttcagagctatcaaatggtaagtggccttccattattcatagtccttgctctaccaaattttagttatgttatttacagcaacataactctcaaaatcccactgctgaaatatcatatcccatagctgactcataacacaagagaaagccacctctgctttcaaaagtacccatagtgcaaatatctaagggtaaagaagaaagcgtgagtgtacttactactcaccaggaagttctcagggtccacgtgcagcttgttacagtgcaggtcactcagtgtagcaaaggtgcctttgaggtcatccgtgagcataacagcttttccgaaggagatcagcaccttcttgccatgtgccttgactttggggttgcccattattgcacagtcagagcccagatatccaaaactttcaaagtacctctaggtccatgggtagacaaccaggagactgtgggatagtcataatcacagagcaggtgcaaagtcagactatgtaagacaacgggctaatccctctttcagaaacactttctgcctttctgcaccttgtcccggcttccagtacctacctgcccagaatctcacctccagccttctcaccttaaccttgcttcacaggctggtggcagcagccttcttgtcagcagtgaaatgcactacagtgtcagatctgggagtttcctggtgatcacagatgagccagaagcatgcctgcattgctgcttcatgtgtggctttttacttctcctctctggcccccagccctttgcctctcccagtgaaatgaatctattgaccagccctttgcctccctcagtaaaatgaatctattggtcaagggtgggttgtgactccaggggtggggtttgggcaaggaagttttgcaagatggacattcgagtttctgatagaatccaggtggccttctcaggggaactttgctgttcaggcttaatttgaaactttacttccttcccctccattttcctacactacccccaccatccagtgtgcagtttatttctcaaggacttcgccagcagccgctaataacctgaatgctgacaaataggaataagttacaactgaaaaggataagaattacgaatatcttagccatcaattcctggatcaggagttgtgacaatgtaacaacgtgttatcctgttattcatccaggctttatgtggaagaagccacagcctttcttggttttcaattctcttgagactacattgaatacacaatttcatcagtttttttttctttctttctttctttttcttttttttttttttttttttgagatggagtctcgctttgtcacccaggctggagtgtgcagtggcgcgatctctgctcaccgcaagctctgcctcccaggttcacgccattctcctgcctcagcctcccgagtagctgggactacaggcacccgccactgtctctggctaattttttgtatttttagtagagatggggtttcaccatgttagccaggatggtcttgatctcctgacctcgtgatccgcccacctcagcctcccaaagtgctgggattacaggtgtgagccaccgcgcccggccaatttcatcactttttagaatagaaataaacacctctatccagcatcaacttggaagaaagcagaataagaaacaaactagggaagtaaggggaaaactgggttttattactgtgttttttaatccatttagtagtcagtgtacttatctgaacaaaggagatttcctctgaatcattgaacaatagtccatgtcaaatcctacatatctacaaaattatgccagaacatctaatagtgttgggggagaagtgtgctgctctgttcaagcaagaggataggagattccgtggcccgtgctgggcattaggtcatttgtgtctggcacaggcttgatctatagtctaatgctgtgtttaacttgtctttatatctaatcaggcaaagacattcttcactgacaatattccacaggctgctgcacgtgtctcatgtgctgcacgtctcatgcgtctcaaacaagcaatttcaggaatagacagggcacacttccaccggcagagagaagaacagtttattttatattcttaaggcttactgtcctcatacttagaggttcaggatgctggtttgtgtgttacccctgagataaatccttacaagaaataaagtttaggaaatcacccccatgtgtatttcaaggagactctaaatttcaaagagttaaacccaatatattaaagctgaatttctgatattagagacacaatattttagtctacttgatatagttgagaggcagttacctgttttacttaggaacatggggaaagtttgtagtgacaaacagtttgaggcaaaaccaagattatctttaagagcagagatcgatgatatgaagaaaaagaagtggcaactttgactatatgcaggaaacacatttatattgagttgtggggactggcctcagaggaaacttcaggtcatgtcctttaatggccctaaaactcattcccaaaagaatttctgttcattgccatacctcatatccttaggtacatacatctaaaaccctgcgtaccagtgaacagctgccccatctttccatcagccaaccaggaattcagcagttactgctaacttccacttttctctcacccgctccaggaaaagtgacctgcagtcactttcctggaagtattgattctttcttgtttgtggctgttccccatttccaattgttttccatgattattgcttctactgtgatctatagactcttatatcatcaataccaggttatcattgcagttgtcaacttctctctgttgcatcttatgcattaattcaacaaatacatattagattccatatgtcatccatgaagtttcattcatatgccatccatttttcttaattctgagaatcttacatgaactagacagacagattctctggctaatggtgccctcactatagtgagcagaggagaccagcatacatactaaaagaaatgaattaataagagatttcagatggtattatatgacttgaagaaactgcatattgtacctacaaccatctggtcttttagaaacctgacaaaagcaagcaatggggaaaggattttcaatttaataaatgatgggggagaactggctagccatatgctgaaaaatgaaactggactccttccttataccttatccaaaattaactccagatggattagagacttaaatgaaaaaccccaaactataaaaagcctagaaaaaaatcaaggcaatactattcatgatataaacacgggcacagatttcatgatgaaagcgtgaaaagcaattgcagcaaaagcaaaaattgaccaatggaatctaattaaactaaagagctcctgctcagcaaaagaaactaccatcagagcgaaagacaatctacagaatgggaaaaagattttccaatctattcttctgacaaaggcctaatatccagagtaaacaagaaacttaaacaactttacaagaaaaaaaaaacccattaaaaccatggcacacttttacctataaaacaaacctgcatatcctgtacgtgtacccctgaatttaaggtaacagtaaattaaattaaaagaaaaatgccatggcaatgtcagaaagttaccctatatggcctaaaaagagaaggcataaataatccaaaacttgtttaacatatcatcaagaaataaccataaaaggaacaaccagcggccctcggggctgctctgcctatgcagtagtcattcgtttatttctttactctctcaagaaatttgctttgacttaaaaaaaacaaaaaacaaaaaagaaagaaagtgcatattctgaaacggtagtgactgcatttgaagtgggacctttatgatatgatggagccaggcagagatgttggagaagttcctgaaagaaggaagggcatgtgccaaattctgaggctgaggagaaaaaagaaagaaagaaaaaaagaataaagaactttacatttcactgtatgtaaagacattacaaggctagagtaaagcatgttgaagtaaaaataggagaaatcaaagttagagagaagggcgcaggcttattatttgggtcttatagatgagagtagtagagtaggtattttatactgaaacataggggacgaggggagctttgcaaacctgagataaacatggtctgtagtccactcaaaacccaagcttatttttttctccttcttcatctgccttactcagtgcaaggtgctataacaaaatacaaaagactgggtggcttcaacaacagagttttttctcacatttctgaaggctgactcgtggtcagggttctcttcctggattgcagatggcggacttctcactgtgtcctcaccgggaggaaagagaaatggcttgtctctctgcttctgataaggaaaataattttatgatggggatctgctcttatgagctcatctaaacctaattacttttcaaaagcctcccccacagataaggtcagttgggagttggggattcagcatgtgaattttgaggagacacaaacattaggtccgtaacaccatcatattaaactcttacttatagagatgcactaacatccaactatacaaaaattccattaagtaagccttccaattaatgttgtacaaattcttcccactacattttgatctcacagtgctggtctgtttctcagacataacatgctcatgctgacttgtgagcctctgctgattcatttcttacacctaagtccccacctcccccagagtcttacaatgaggtctctcccttgaaatgctgtgaccaatctgcacacttgagggcatgggattaatttcactttcttaggcatccacaagggctgtgaaaagctaagtgccattagaaatagtattcctcctaataaaatagaattgctacacctgactaaaccttgaattcctaaagcttggaacactttcccttccttaagaaccatccttgctactcagctgcaatcaatccagcccccaggtcttcactgaaccttttcccatctcttccaaaacatctgtttctgagaagtcctgtcctatagaggtctttcttcccaccggatttctcctacaccatttactcccacttgcagaactcccgtgtacaagtgtctttactgcttttatttgctcatcaaaatgcacatctcatataaaaataaatgaggagcatgcacacaccacaaacacaaacaggcatgcagaaatacacatacacacttccctcaatataaaccctttgtggctcatatatttaaaaagatgtaaaaaaaagagctgaagaaaatcatgtgtgatctctcagcagaatagatttattatttgtattgcttgcagaataaagcctatccttgaaagctctgaatcatgggcagtgagctcagtggtatctggaggacagggcactggccactgcagtcaccatcttctgccaggaagcctgcacctcaggggtgaattctttgccgaaatggattgccaaaacggtcaccagcacatttcccaggagctgttgagatgaaaggagacaataaagatgaacccatagtgagctgagagctccagcctggcctccagataactacacaccaagcttccacccagaatcaagcctatgttaacttccctcaaagcctgagattttgccttcccattaaatgcaggtagttgttccccttcaagcactagtcactggccataatttaaatcttgctatcttcttgccaccatgaaccctgtatgttgtaggctgaagacgttaaaagaaacacacgctgacacacacacacacacgcgcgcgcgcacacacacacacacacacagagctgactttcaaaatctactccagcccaaatgtttcaattgttcctcacccctggacatactttgcccccatctggaattaaaggatataagtttgtaatgaagcattagcagcattttatatgtgtccagctgatataggaatagccttagcaatgtatgtttggccaccaaagttccccactttgactgagccaatatatgccttctgcctgcatctttttaacgaccatacttgtcctgcctccagatagatgttttaaaacaacaaaaatgagggaaagatgaaagttctttctactggaatctaataaagaaaagtcattttcctcatttccacctctcttttctcaaagtcaaaattgtccatctagatttttagaggcactccttaggccctaaaacattaccactgggtctcagcccagttagtcctctgcagtttcttcacccccaaccccagtatcttcaaacagctcacaccctgctgtgctcagatcaatactccgttgtctaagttgcctcgagactaaaggcaacagggctgaaacatctcctggactcaccttgaagttctcaggatccacatgcagcttgtcacagtgcagttcactcagctgggcaaaggtgcccttgagatcatccaggtgctttgtggcatctcccaaggaagtcagcaccttcttgccatgtgccttgactttggggttgcccatgatggcagaggcagaggacaggttgccaaagctgtcaaagaacctctgggtccatgggtagacaaccaggagcctgtgagattgacaagaacagtttgacagtcagaaggtgccacaaatcctgagaagcgacctggacttttgccaggcacagggtccttccttccctcccttgtcctggtcaccagagcctaccttcccagggtttctcctccagcatcttccacattcaccttgccccacaggcttgtgatagtagccttgtcctcctctgtgaaatgacccatggcgtctggactaggagcttattgataacctcagacgttccagaagcgagtgtgtggaactgctgaagggtgcttccttttattcttcatccctagccagccgccggcccctggcctcactggatactctaagactattggtcaagtttgccttgtcaaggctattggtcaaggcaaggctggccaacccatgggtggagtttagccagggaccgtttcagacagatatttgcattgagatagtgtggggaaggggcccccaagaggatactgctaattttttttatagcctttgccttgttccgattcagtcattccagtttttctctaatttattcttccctttagctagtttccttctcccatcatagaggataccaggacttcttttgtcagccgttttttaccttcttgtctctagctccagtgaggcctgtagtttaaagctaaagcatgtaccaatttttgaaaagttcagggattgtgaaatgtgttttaggcataggtccaggatttttgacgggacaaatcttagtctctttcagttagcagtggtttctaaggaaaaagtgctatacttctttttgaatatactctttgtgacttttgccattatctcttaatttctcaatagtgcagtgaaaacaatttctataaagccacagtttcagcgcagtaatagattagtgttacataatataagacctaatgcttacctcaatatctacttatccgtacctatttgaaataaatcatgactgtttcatcttagaaaaatatttgattccatattcaggtatgtatgtatacaccagatgatgtgtatttaccactggataagtgtgtgtgctggctgatgacccagggttttggcgtagctcttctatgctcagtaaagatgatggtagaatgttctttggcaggtactgtggattagaattaattatcttgtataaatgctaggttcacttctcagggaatcttactctaagacataagatgtgcgtgtacatggaaaacaactctaaagaggcaagggttgtttttattgactaatagtccacacactattataactcgaatattagtgtactttagacagctttatttctaacacagtgctgtttctgacatattggaccattaacagggtaggaagtatttatggtggttttttggttctgttttgcttttggttagtttgtttttgtttttctctgaaagtgatccatgatctctaaccttgctagattataatgccagaagctctggaattctggcttatcggaggcaagctgtatcttcaaattagtttatcccctaagctatcaggttgattgaaattattataatattggtgaaattctttcatccttcatgatcctgtgtaaagcttatatctgctcattgatacagatggctaaaaggccagaaagacacacatttacccatgtaacaagcctgcacatcctgcacatgtaccttcgaaattaaaatgaaatgaaataaaattaaaaggaaaaaaatgccatggcaacatcaggaagttatcttttatggtctaaaaatgggcagcataaataatctaccccttgtttagcatactattgaaaaataacaataaaaatcggcaaccagtagcccttgcgtctactctgcctatgaagtagccattcatttattccttcaattttttataaacttgttttactaaaaaaaaaaaggacaaagaaagaaagtgcgaattgtgaaatggtagtgagtgatggcatttgaagtgggtcctttatgatttgatggagccaggcagaagacgtttggagaaagaagttcctgaaagtaggaagggcatgtggaaaactctgaggctgaggaaaaaaaagaaagaaagaaatataaagaaagaacttgacatttcactgtatataaacacattacaagcctaaagtacgttgaagaaaaaatagaattcaaagttagacagaagggctcaggcttactatttgcatcttacagatgagagtagtagagttggtattttattctgaaacacagaggacaagtggagatttgtaaacctgagataaacatggtttctaatccactgaacaccgaagcttatttttttctctttcttcatctgccttacttagtgcaaggtgctataacaaaatagcatagactgggtgacttcaacaacaggattttttctcacttttctgctggttcctggtcagggctctcttcctgggttgcaggtggctgacttcccactgtgtcctcaccagaaggaagagaaatggctaatctctctgcttctgatgaggaaaataattctatgatggggatctgctctcatgagctcctctaaacctgattacttttccaaagcctcccccacaaatggagccaattgggagttggggattcagcatgtgaattttctggagacacaagcgttaagttcataacaccatcacattaaactaaactcttgcttattaacgtgcattaactttcaattatataagaactccagtgaatctgccttctcaattaatgttatacaaattcttcacactatattttcatctgaccgtgctgttctgctgctgagacatgacacgctgatgctgacttgtgagcttctgctggctcatttccttcacctaagtccccacctccctagaagcttacaatgaggtctcctccttgaaatgctgtgaccagtctgtagacttaagggtatgggattaatttcacctctttaggcatgcgtcaacacttaaaatgaaaagttccttagtaaagtaaggatcacttcattgtagttaccgtggaaagaaaaacctgtttcctgctctgatctctaacacctcaacctccctgtagagcctcacaagggctgagaaaagccagatgccgttggaaatagtattgcccctaataaaatagaatggctatccctgcctaaaccttgacttcctaaagcttggaacactttttcttcgttgagccccttcctcgctgctgtgctgcaatccagggaagggggttcagcccccttcactgaacctttccccatctcttccaaaacatctgtttctgaggagtcctgtcctatagaggtctttcttccaaccagatttctcctgcaccttttactcccacttgcagaactcccatgtacaagtttctttattgcctagttcttttatttgctcatcaaaacccacatctaacgtaaacaaaaaagtgtggagtgtgcacatgacacaaacacacatagccatgtataaatacacataaacacatccctcaacataaaaccctttgtggctcatatatttaaaaagacataaaaaaagaactgaagacaaccatgtgtgatctcttagcagaatagatttattatttgattgcttgcagaataaagcctatccttgaaagctctgcatcatgggcagtgagctcagtggtatctggaggacagggcactggccactccagtcaccatcttctgccaggaagcctgcacctcaggggtgaattctttgccgaaatggattgccaaaacggtcaccagcacatttcccaggagctgttgagatgaaaggagacaataaagatgaacccatagtgagctgagagctccagcctggcctccagataactacacaccaagcttccacccagaatcaagcctatgttaacttccctcaaagcctgagattttgctttcccattaaatgcaggtagttgttcttcttgcagcactagtcactggccataatttaaatcttgttatcttcttgccaccatgaaccctgtatgctgtaggctgaaaacgttaaaagaaacacacgctctcacacacacacaaacacacgcgcgcacacacacacacacacacacagagctgactttcaaaatctactccagcccaaatgtttcaattgttcctcacccctggacatactttgcccccatctggaattaaaggatataagtttgtaatgaagcattagcagcattttatatgtgtccagctgatataggaatagccttagcaatgtatgtttggccaccaaagttccccactttgactgagccaatatatgccttctgcctgcatctttttaatgaccatacttgtcctgcctccagatagatgttttaaaacgaataacaaaaataggggaaaggtgaaagttctttctaccgaaatctaataaagaaaagtcattttcctcatttccacctctcttttctcaaagtcaaagttgtccatctagattttcagaggcactccttaggccctaaaacattgccactgggtctcagcccagttagtcctctgcagtttcttcactcccaaccccagtatcttcaaacagctcacaccctgctgtgctcagatcaatactcagttgtctaagttgcctcgagactaaaggcaacagtgctgaaacatctcctggactcaccttgaagttctcaggatccacatgcagcttgtcacagtgcagttcactcagctgggcaaaggtgcccttgagatcatccaggtgctttatggcatctcccaaggaagtcagcaccttcttgccatgtgccttgactttggggttgcccatgatggcagaggcagaggacaggttgccaaagctgtcaaagaacctctgggtccatgggtagacaaccaggagcctgtgagattgacaagaacagtttgacagtcagaaggtgccacaaatcctgagaagcgacctggacttttgccaggcacagggtccttccttccctcccttgtcctggtcaccagagcctaccttcccagggtttctcctccagcatcttccacattcaccttgccccacaggcttgtgatagtagccttgtcctcctctgtgaaatgacccatggcgtctggactaggagcttattgataacctcagacgttccagaagcgagtgtgtggaactgctgaagggtgcttccttttattcttcatccctagccagccgccggcccctggcctcactggatactctaagactattggtcaagtttgccttgtcaaggctattggtcaaggcaaggctggccaacccatgggtggagtttagccagggaccgtttcagacagatatttgcattgagatagtgtggggaaggggcccccaagaggatactgctgcttaattttttttatagcctttgccttgttccgattcagtcattccaatttttctctaatttattcttccctttagctagttttcttctcccaccatagaagataccaggacttcttttgtcagccgtttttcaccttcttgtctgtagctccagtgaggcctgtagtttaaagttaaagcatgtaccaatttttgaaaagttcagggattgtgaaatgtgttttaggcataggtccaggatttttgatgggacacgtcttagtctcatttagtaagcattggtttccaaataagaagtgctatacttatctttgaatatactctctgtggttttaggccattatctcttaagttctcattagtgtagtgaaaaatcctataaagcaacagtttcagtgcaggaatagattaatgttatgtaatataatataagactgaatccttacttcaatatctacttatccgtacctatttgaaataaatcacgcctgtttcatctcagcaaaagtattttttttatattcaggtatgtatgtaggcacccgatgatgtgtatttatcactggataagtgtatgtgctggctgatgacccagggttttggtgtagctcttctatgctcggtaaagatgatggtagaatgctctttaccagatactatggattagaattaattatcttgtataaatgctaggttcacttcttagggaatcttattctaagacataagacatgtatttgcatggaaaacaactcttaagaggcagggactgttttattgactaatagtccacacactgtgacagctgggatgtcactgtagtttagacatctttatctgtaactcagtgctgtttctgacatattggccacttaacatggcaggaagtattcatgctgtttttttctttattttttctttgggatttttattttttggtaggtttggttttgcttttgttttttctctgaactcgatccatgaccttggtagattatgacgtcagaaactctggaaatctggcttattggaggagagctctaccttcccctaacctatcaggttgataggaattataataatattggtggaatcctttcagacttcataatcctgtgtaaggcttatatctgctcaaagtgttaggcggctaaaagaccagaaagatacatgttgacctgcgcaacaaagctgcacatattgcacttgttctttggaagttaaaataaaagttgaataagaaaggaaagaaaaagatttgtcaacttatcagtatcttccagttactcacataataataagtgacttctctcaatctaaggatgggtgagaaagatttttattggtatgctggtacagattatagagactgaggtgaacccaaattagggtctctttaagataggggatctgtgagatgggtgtgtatagatctttggccatatctgagagtctggttgggttccatttgtagagcctgacctttaagaatgtgtcagagactggtgtctaagcccgctaaggcctaaacaagtgaatcttttgaatctctcttttttttttttgagacagagtcttgttctgtcacccaggctggagtgcagtggtatgatctcggctcactgcaactcctgccttccaggttcaagcaattctccttcctcagcctcccaagtagctgggattacaggcacttgccatcatgcctgtctaatttttgtatttttgtagagatgggatttcaccatgttggccaggttggtcttgaactcttgacctcaggtgatctgcctgccttggcctcccaaaattctgggattacaggcgtgagccaccactcccagcctctaaacaagtgaatcttaattgctcctcctcagactaaggaatatctaggatccctcctgttttcaaacaacttccccatttatccaaaaaccaaggcagtgttctaaaagtcatgtataaacccttatttcctcttatgcttttgaggcaatatcttttaagagtttgttgatttctccttatccataactgtcttattcctcgatttttcctatatcattgcttctgacattgattaaatcctaactgataaaactgtttctttacacaagcaatttcaagtgttttcaagcattctttcccatgtattttcaaacatttgttcagcaaatatctgttaaataaatgtcataatttttaaagtagtgggcatttaagttaaataagtcagagaataaaactttcctctgaagattataatctaggtagaacatacataaaattaataattaagttaaacaacaaaataatttcagatattattaactaagaatgaaattaaggagaaagtattcgaacagaggcaaaatgacagaaggaatctgccatgggaaggcattgccaaataaagtttagaagctgaaatagtaaattcaaagctctgaagcagaagaaaacaaactcctgctgtgccagagagttagataaagaaccagtgccgttgatatgtaaagtggagaatagcaggtggtattgtttcagggaagcataaacctaaggacataaacttgtcctcagtggtagggagtgagaagccattatagaattttaactctggtaatgacataatctctaagcaacctgtactattggctggattactattctaagaatgacctgtttatcacaactgttttgcttaaaaagcccttattgcctgtggacaattattagttattctttcaactattaaaaatcttgtcatgcagatgtgtgtgtgtgtgtgtgtattcattatgaatttgctttcaattaagttatcttgaattggcaatatctaaatctagatatagctccctaaggggtaaagagtgtatccactgcccacccctcaacatcacgtccttgattccttgatatcaaagggcagtatagttttgggggagaagaaaaagagagagagagaaaaaaagattgattaaaaatgcatattaccgacaaattagagggtgatggcagatgggaggcagcagaagtacattgcagctcccactcggatgcacagagcagcatgtgaagtctcccatcaggaattttttttgcagaaccacctgcagaaataaatcaagaaagctgagagaacgcacacaccctctgaaagaagcagattgctcctgcaggacccgggaaacaccccaaatattgtgagtgcccaaactgtggaagtggaaaagggggaccgtctacccccaaacacacatcctcactggggaacctgaagatctagaccacaggagaagattctgaccttacctggagctgagtcaatttagagggccaagcaaaatacaggggtagaggaagcagcgggaaaagccctgtgggctctctgggtcccctaggaagccatttctgccttgcctcacaggggtcatttgggagggctgccagaggaactgggaaaagatgacaggaaaaagaaaatctccacctggccagatctaggggctgggcagtgggggggttggtggggggacatgaatttggtgtgcagactccactggcagggaagtaggacagccctacttggtttcgcagctggtagcctggggcaagttctcagccttgctcactgactgcatggaaacagattcggtgctgttgcgggggagggtgcacgctggaagtgagaccaaccttttgagttgcatgggagctgggcaagtcacgtgactgcttgctttcccccactttcctgatgacctgcatgacacagcagaggcagccataattgtcctaggaacataaatccattgacctggaaactacacccccatcctcccacagtagccacagaaagacctgcccaaggagactctgagctcagacacgactagtcctgcccccacctgatggtccttccttactcaccctggtagctgaagacaaagggcatatattcttgggagttctagggtgccccagcccccccagccaccaccacctgactgcctctgctgatgctttctagaaagtgccacctcctggcaggaggccaaccagcacaaaaatagtgcattgaacaaccaaaagtaaggaccctcacagagtccatttcatcctctgccacctccattggagcaggtggttgtatctatggctgagagacccacagatggttcacgtcacaagactctgtgcagacaaaccccagtaccagcctggagtctggtagacctgatgggtggctagatccagaagagagataacaatcactacagttcggctctcaggaagccccacgcctaggaaaagggggactgtgctacatcaagggaacacctcatgggacaaaagtctcagccttgaggcctagactttccctctgacagagcctacccaagtgagaaggaaccagaaaactaactctggtaatatgaaaaacaaggttctttaacaccccccaaaaaatcatactagctcaccagcaatgcatccaaaccaagaagaaatccctgatttacctgaaaaataattcagaaggtcagttattaagctaatcaaggaggcatccgaggaaggtgaagtccaattttaaaaaaaccaaaaatatgatacaagaaatgaggggagaaatcttcagttaaagagatagcataaataaaaaacattcaaaacttcaggaaacaatggatgaatggatgcacttatagaaatgcaaaatgctctagaaagtctcagcaatagaatccaagcagaagaaattcagagcttgaagacaaagtttttgaattaacccaatccaacaaagacaaagaaaaaagaataagaaaatatgaacaaagcctccaagaaatctgggattatgttaaacaatcaaacctaagaataatcagcattcctgagaaagaagagaaatctaaaagtttggaaaacttatccagggaaataatcaaggaaaacttcccccaccttgctagagacctagatatccaaatacaagaagctcaataaacacctgggaaattcattgcaaaaatatcattgcctaggtacattgtcatcagagtatccaaagttatctaaagacaaagagaatcttaagagctgtgaggtgaaactaccaggtaacctatgaaagaaaacctatcagattaacagcagatttctcagcagaaaccgtaaaagctagaagtgaatatggccctatcttcagccttcttaaacaaaacaattatcagccaagaattttatatccagtgaaactaagcttcacaaatgaagaaaatacacagtgtttttcagaaaaacaaatgctgagagaattcggcactaccaagccaacactacaagaactgataaaaggagctctaaatcttgaaataaaccctggaagcacatcaaaacagaacctctttaaagcataaatcccataggacatatacaacaaaaatacagataaaaagatacacaggcaacaaataccacgaagaatggaatagtacctcacacctcaatactgatgttgaatgtaaatggactaaatgctccacttaaaagatacagaattgcagaatgaataagaattcaccaaccagttatctgccgccttcaggagactcacctaacacataaggactcacataaacttaaggtaaaggggtggaaaatgacattccacacaaatggacaccaaaagcgagccaaagcagctattcttatgtcagacaaaacaaactttaaagaaacagcagttaaaaaagacaaagagggacatcatataatgataaaagcccttgtccaatgggagaatattacaattcttaatatatatgcatctaatactggagatcccaaatttataaaacaattactactagactagacagcaacataataatagtgggggacttcaatactccactgactgcactaggcaggtcatcaagacagtctacaaagaaacaatggatttaaagaacaaatggacttaacagatatttacaggacattctacccaacaactgcagaatacacattctattcatcagcacatggaactttctccaagataggccatatgatatgccacaaaacaagcctcaataaatttttaaaaattgaaattatatcaagcactctctcagaccacagtagaataaaattggaaatcaactacaaaaggaaccttcaaaaccatgcaaatacagggaaattaaataacctgctcctgaatgatcattgggtcaacaatgaaatcaagatggaaatttaaaaatcatttgctttgaaaaccggcacaagacaaggatgccctctcgccactcttactcaacatagtattggaagttctcgccaggacaatcaggcaagagaaagaaataaagcatattcaaataggaagagaggaagtcaaattgtctctgtttgcagatgacatgattgtatatttagaagaccctgtcatctcagcccaaaatcttaagctgataaacagcttcagcaaagtctcaagatacaaaatcagtgtgcagaaatcacaagcgttcctatacaccaataatagacaagcagagagccaaatcatgggtgaactcccattcacaattgctgcaaagagaataaaataaaatacctagaaatacaacttctaagggatgtgaagaacctcttcaaggagagctacaaaccactcactgctcaaggaaataagagaggacacaaacaaatggaaaaacattccatgctcatagatagaaagaatcaatatctttaaaatggccatactgcccaaagtaatttatagattcaatgctatccccatcaagctaccactgacttttt

SEQ ID NO: 513 - DNA, 25591 bp, Homo sapiens
atatttatggggtacatgtgatacttacatgcctagaacatgtgatgattaagtctagatatttaggatatccattgctttgagcatttatcatttctatgtattgagaaaatttcaaatcctcatttctagccattttgaaatatataataaatagtaattaactatagtcaccctactcaaatatcaaacattatggcttaatccttctatccaactgtgtttgtacctattaaccaacatctcttaaatcccctcccatacacactcacactttttccagcctctgataactatcattctactctctaccaccatgagacccacttttttagctcccacagatgaataaaaacatgtgatatttgactttctgtatctggcttattttattatctatctctttggcataccaagagtttgtttttgttctgcttcagggctttcaattaacataatgacctctggttccatccatgttgctacaaatgacaagatttcattctttttcatggcaaaatagtactgtgcaaaaatacaattttttaatccgttcatctgttgatagacacttaggttgatcccaaaccttaactattgtgaatagtgcttcaataaacatgagtgtaatgtgtccattggatatactgatttcctttcttttggataaataaccactagtgagattgctggattgtatgatagttctgtttttagtttactgagaaatcttcatactgttttccataatggttgtactattttacattcccaccaacagtgtgtaagaaagagttcccttttctccatatcctcacaaggatctgttattttttgtcttttttgttaatagccgttttaactagagtaagtagatatctcattgtagttttgatttgcatttccctgatcattagtgatgttgagaattttttcatatgtttgttggtcatttgtatatctttttctgagaattgtctgttcatgtccttagcctactttttattgggattgtttgttattttcttgataatctatttgtgttcattttagagcctggatattattcttttgtcagatgtatagattgtgaagattttctcccactctgtgggttgtctgtttattctgcagactcttccttttgccatgcaaaagctctttagtttaatttagtcccagatattttctttgtttttatgtatttgcatttgtgttcttggtcatgaaatcctttcctaagccaatgtgtagaagggtttttccgatgttattttctagaattgttacagtttcagggcttagatttaagtccttgatccatcttgagttgatttttgtataaggtgagagatgaagatccagtttcattctcctacatgtagcttgccagctatccccgcaccatttgttgaatagggtgccctttccccactttatgtttttgtttgctttgtcaaagatcagttggatgtaagtatttgagtttatttctgggttctctattctgttccattggtcgatgtgcctatttgtacaccagcatcatgctgttttggtgactatggccttattgtatagtttgaaatgaggtaatgtaatgccttcagatttgttcttttttttagacttgcttgtttattgggctcttttttggttccataagaattttaggattgttttttctagttctgtgaagactaatggtggtattttgatgggaattgcaatgaatttgtaggttgcttctggcattatggccattttcacaatattgattctacccatctatgagaatggcatgtgtttccatttgtttgtgtcttatatgattactttcagccgtgttttgtagttttccttgtagatgtctttcacctccttggttaggtatatattcctaagtttttgttttgttttgttttgttttttgcagctattgtaaaaggggttgagttcttgattttattctcagcttggtcattgctggtatgtaagaaagcaactcattggtgtacgttaattttgtatccagaaactttgctgaattattttatcagttctagggggttttggaggagtctttagagttttctacatacacaatcatatcatcagcaaacagtgacagtttgactttctctttaacaatttggatgtgctttacttgtttctcttgtctgattgctcttgctaggacttccagtaatatgttaaagagaagtggtgagagtgggtatccttgtctcattccagttttcagacagaatgcttttaactttttcccattcaatataatgttggctgtgtgtttaccatagctggcttttattacattgaggtatgtcctttgtaaaccgattttgctgagttttagtcataaagtgatgttgaattttgttgaatgcagtttctgtggctattgagataatcacatgatttttgtttccaattctctttatgttgtgtatcacacttattgacttgcgtatgttaaaccatccgtgcatccctcgcatgaaacccacttgatcatgggttttgatatgctgtcggatgctattagctagtattttgtcaaggatgttggcatctatgttcatcagggatattgatctgtagtgttttttttttttggttatgttctttcccagttttggtattaaggtgatactggcttcatagaatgatttagggaggattctctctttctctatcttgtagaatactgtcaataggattggtatcaattcttctttgaatgtctggtagaattcagctgtgaatctatctggtcctggacttttttgttgttggtaaatttttattatcatttcagtcttgctgcttattactggtctgttcagggtatctaattcttcctgacttaagctagagccctgtatctttccaggaattcgaacgtctcctttaggttttctagtttatgcatgtaaaggtgttcatagtagccttgaataatcttttgtatttctgtggtatcagtaatagtatctcctgttttgtttctaattgagtttatttgcacttctctcctcttttcttggttaatcttgctaatggtctatcagttttatttatcttttcaaagaaccagctttttatttcatttagcttttgtatttttttgcagttgttttaatttcatttagttctcctcttatcttagttattccctttcttttgctgggttttggttctgtttgtttttgtttctctagtttcttgtggtgtgaccttatattgtctgtctgtcctctttcagactctttgacatcgacatttagggctgtgaactttccttttagcaccatctttgctgtatcctagaggttttgataggttgtgtcactattgtcggtcagttcaagtaattttgttgttcttattatactttaagttctgggatacatgtgcagaatgtgcaggtttgttacataggtatagatgtgccatggtggtttgctgcacccatcaacctgtcatctacattaggtatttcttttaatgttatccctctcctaaccccctcaccccccgacaggccctggtgtgtgatgttcccctccctgtgtccatgtgttctcattgttcaactcccacttatgagtgagaacgtgtggtgtttggtttctctgttcctgtgttagtttgctcagaatgatggtttccaccttcatccatgtccctgcaaagacatgaactcatcatttttatggctgcatagtattccatggtgtatatgtgccacattttctttatccattatatcgctgatggccatttgggttggttccaagtctttgctattgtgaatagtgccacaataaacatacgtgtgcacgtgtctttatagtagaatgatttctaattctttgggtatatacccagtaatgggattgctgggtcaaacagtatttctggttctagatccttgaggaatcgccacactgtcttccacaatggttgaactaatttacacacccatcaacagtgtaaaatttttcctattcttccacatcctctccagcaccttttgtttcctgactttttaataattgccattctaactggcatgagatggtatctcattgtggttttgatttgcatttctctaatgaccagtgatgatgagcttcttttcatgtgtttcttggccacataaatgacttctttagagaagcatctgttcatatcctttgtccactttttgatggggtcgttaggttttttcttgtaaatttgttgaagttctttgtagattttggatgttagccctttgtcagatggatagattgcaaaaattttctcccattctgtaggttgcctgttcactctgatgatagtcttttgctgtgcagaagctctttagtttaattagatcccatatgtcaattttggcctttgttgtcattgcttttgatgttttagtcgtgaatttttgcccatgcctatgtcctgaatggtattgcctaggttatcttctaggatttttatggttttaggttgcacatttaagtctttaatccaccttgagttaatttttgtataaggtgtaaggaaggggtacagtttcagttttatgcatattgctagccagtttttccagcaccatttattaaatagggaattctttctccattgcttttgtgatgtttgtcaaagatcagatggtcgtagatgtgtggcattatttctgaggcttctgttctgttccactggtctatatatctgttttggtaccagtaccatgctgtttttgttactgtagccttgtagtatagtttgaagtcaggtagcatcatgcctccagctttgttctttttgtttaggattgtcttggctatatgggctcttttttgattccatatgacatttaaagtagttttttctaattctttgaaaaaagtcagtggtagcttgatggggatagcattgaatctataaattactttgggcagtatggccattttaaagatattgattctttctatctatgagcatggaatgtttttccatttgtttgtgtcctctcttatttccttgagcagtgagtggtttgtagctctccttgaagaggttcttcacatcccttagaagttgtatttctaggtattttattttattctctttgcagcaattgtgaatgggagttcacccatgatttggctctctgcttgtctattattggtgtataggaacgcttgtgatttctgcacactgattttgtatcttgagactttgctgaagctgtttatcagcttaagattttgggctgagatgacagggtcttctaaatatacaatcatgtcatctgcaaacagagacaatttgacttcctctcttcctatttgaatatgctttatttctttctcttgcctgattgtcctggcgagaacttccaatactatgttgagtaagagtggcgagagggcatccttgtcttgtgccggttttcaaagcaaatgatttttaaatttccatcttgatttcattgttgacccaatgatcattcaggagcaggttatttaatttccctgtatttgcatggttttgaaggttccttttgtagttgatttccaattttattctactgtggtctgagagagtgcttgatataatttcaatttttaaaaatttattgaggcttgttttgtggcatatcatatggcctatcttggagaaagttccatgtgctgatgaatagaatgtgtattctgcagttgttgggtagaatgtcctgtaaatatctgttaagtccatttgttctttaaatccattgtttctttgtagactgtcttgatgacctgcctagtgcagtcagtggagtattgaagtcccccactattattatgttgctgtctagtctagtagtaattgttttataaatttgggatctccagtattagatgcatatatattaagaattgtaatattctcccattggacaagggcttttatcattatatgatgtccctctttgtcttttttaactgctgtttctttaaagtttgttttgtctgacataagaatagctgctttggctcgcttttggtgtccatttgtgtggaatgtcattttccacccctttaccttaagtttatgtgagtccttatgtgttaggtgagtctcctgaaggcggcagataactggttggtgaattcttattcattctgcaattctgtatcttttaagtggagcatttagtccatttacattcaacatcagtattgaggtgtgaggtactattccattcttcgtggtatttgttgcctgtgtatctttttatctgtatttttgttgtatatgtcctatgggatttatgctttaaagaggttctgttttgatgtgcttccagggtttatttcaagatttagagctccttttatcagttcttgtagtgttggcttggtagtgccgaattctctcagcatttgtttttctgaaaaacactgtgtattttcttcatttgtgaagcttagtttcactggatataaaattcttggctgataattgttttgtttaagaaggctgaagatagggccatattcacttctagcttttacggtttctgctgagaaatctgctgttaatctgataggttttctttcataggttacctggtagtttcacctcacagctcttaagattctctttgtctttagataactttggatactctgatgacaatgtacctaggcaatgatatttttgcaatgaatttcccaggtgtttattgagcttcttgtatttggatatctaggtctctagcaaggtgggggaagttttccttgattatttccctggataagttttccaaacttttagatttctcttctttctcaggaatgctgattattcttaggtttgattgtttaacataatcccagatttcttggaggctttgttcatattttcttattcttttttctttgtctttgttggattgggttaattcaaaaactttgtcttcaagctctgaatttcttctgcttggattctattgctgagactttctagagcattttgcatttctataagtgcatccattcatccattgtttcctgaagttttgaatgttttttatttatgctatctctttaactgaagatttctcccctcatttcttgtatcatatttttggtttttttaaaattggacttcaccttcctcggatgcctccttgattagcttaataactgaccttctgaattatttttcaggtaaatcagggatttcttcttggtttggatgcattgctggtgagctagtatgattttttggggggtgttaaagaaccttgtttttcatattaccagagttagttttctggttccttctcacttgggtaggctctgtcagagggaaagtctaggcctcaaggctgagacttttgtcccatgaggtgttcccttgatgtagcacagtcccccttttcctaggcgtggggcttcctgagagccgaactgtagtgattgttatctctcttctggatctagccacccatcaggtctaccagactccaggctggtactggggtttgtctgcacagagtcttgtgacgtgaaccatctgtgggtctctcagccatagatacaaccacctgctccaatggaggtggcagaggatgaaatggactctgtgagggtccttacttttggttgttcaatgcactatttttgtgctggttggcctcctgccaggaggtggcactttctagaaagcatcagcagaggcagtcaggtggtggtggctgggggggctggggcaccctagaactcccaagaatatatgccctttgtcttcagctaccagggtgagtaaggaaggaccatcaggtgggggcaggactagtcgtgtctgagctcagagtctccttgggcaggtctttctgtggctactgtgggaggatgggggtgtagtttccaggtcaatggatttatgttcctaggacaattatggctgcctctgctgtgtcatgcaggtcatcaggaaagtgggggaaagcaagcagtcacgtgacttgcccagctcccatgcaactcaaaaggttggtctcacttccagcgtgcaccctcccccgcaacagcaccgaatctgtttccatgcagtcagtgagcaaggctgagaacttgccccaggctaccagctgcgaaaccaagtagggctgtcctacttccctgccagtggagtctgcacaccaaattcatgtccccccaccaacccccccactgcccagcccctagatctggccaggtggagattttctttttcctgtcatcttttcccagttcctctggcagccctcccaaatgacccctgtgaggcaaggcagaaatggcttcctaggggacccagagagcccacagggcttttcccgctgcttcctctacccctgtattttgcttggccctctaaattgactcagctccaggtaaggtcagaatcttctcctgtggtctagatcttcaggttccccagtgaggatgtgtgtttgggggtagacggtcccccttttccacttccacagtttgggcactcacaatatttggggtgtttcccgggtcctgcaggagcaatctgcttctttcagagggtgtgtgcgttctctcagctttcttgatttatttctgcaggtggttctgcaaaaaaaattcctgatgggagacttcacatgctgctctgtgcatccgagtgggagctgcaatgtacttctgctgcctcccatctgccatcaccctctaatttgtcggtaatatgcatttttaatcaatctttttttctctctctctctttttcttctcccccaaaactatactgccctttgatatcaaggaatcaaggacgtgatgttgaggggtgggcagtggatacactctttaccccttagggagctatatctagatttagatattgccaattcaagataacttaattgaaagcaaattcataatgaatacacacacacacacacacatctgcatgacaagatttttaatagttgaaagaataactaataattgtccacaggcaataagggctttttaagcaaaacagttgtgataaacaggtcattcttagaatagtaatccagccaatagtacaggttgcttagagattatgtcattaccagagttaaaattctataatggcttctcactccctaccactgaggacaagtttatgtccttaggtttatgcttccctgaaacaataccacctgctattctccactttacatatcaacggcactggttctttatctaactctctggcacagcaggagtttgttttcttctgcttcagagctttgaatttactatttcagcttctaaactttatttggcaatgccttcccatggcagattccttctgtcattttgcctctgttcgaatactttctccttaatttcattcttagttaataatatctgaaattattttgttgtttaacttaattattaattttatgtatgttctacctagattataatcttcagaggaaagttttattctctgacttatttaacttaaatgcccactactttaaaaattatgacatttatttaacagatatttgctgaacaaatgtttgaaaatacatgggaaagaatgcttgaaaacacttgaaattgcttgtgtaaagaaacagttttatcagttaggatttaatcaatgtcagaagcaatgatataggaaaaatcgaggaataagacagttatggataaggagaaatcaacaaactcttaaaagatattgcctcaaaagcataagaggaaataagggtttatacatgacttttagaacactgccttggtttttggataaatggggaagttgtttgaaaacaggagggatcctagatattccttagtctgaggaggagcaattaagattcacttgtttagaggctgggagtggtggctcacgcctgtaatcccagaattttgggaggccaaggcaggcagatcacctgaggtcaagagttcaagaccaacctggccaacatggtgaaatcccatctctacaaaaatacaaaaattagacaggcatgatggcaagtgcctgtaatcccagctacttgggaggctgaggaaggagaattgcttgaacctggaaggcaggagttgcagtgagccgagatcataccactgcactccagcctgggtgacagaacaagactctgtctcaaaaaaaaaaaagagagattcaaaagattcacttgtttaggccttagcgggcttagacaccagtctctgacacattcttaaaggtcaggctctacaaatggaacccaaccagactctcagatatggccaaagatctatacacacccatctcacagatcccctatcttaaagagaccctaatttgggttcacctcagtctctataatctgtaccagcataccaataaaaatctttctcacccatccttagattgagagaagtcacttattattatgtgagtaactggaagatactgataagttgacaaatctttttctttcctttcttattcaacttttattttaacttccaaagaacaagtgcaatatgtgcagctttgttgcgcaggtcaacatgtatctttctggtcttttagccgcctaacactttgagcagatataagccttacacaggattatgaagtctgaaaggattccaccaatattattataattcctatcaacctgataggttaggggaaggtagagctctcctccaataagccagatttccagagtttctgacgtcataatctaccaaggtcatggatcgagttcagagaaaaaacaaaagcaaaaccaaacctaccaaaaaataaaaatcccaaagaaaaaataaagaaaaaaacagcatgaatacttcctgccatgttaagtggccaatatgtcagaaacagcactgagttacagataaagatgtctaaactacagtgacatcccagctgtcacagtgtgtggactattagtcaataaaacagtccctgcctcttaagagttgttttccatgcaaatacatgtcttatgtcttagaataagattccctaagaagtgaacctagcatttatacaagataattaattctaatccatagtatctggtaaagagcattctaccatcatctttaccgagcatagaagagctacaccaaaaccctgggtcatcagccagcacatacacttatccagtgataaatacacatcatcgggtgcctacatacatacctgaatataaaaaaaatacttttgctgagatgaaacaggcgtgatttatttcaaataggtacggataagtagatattgaagtaaggattcagtcttatattatattacataacattaatctattcctgcactgaaactgttgctttataggatttttcactacactaatgagaacttaagagataatggcctaaaaccacagagagtatattcaaagataagtatagcacttcttatttggaaaccaatgcttactaaatgagactaagacgtgtcccatcaaaaatcctggacctatgcctaaaacacatttcacaatccctgaacttttcaaaaattggtacatgctttaactttaaactacaggcctcactggagctacagacaagaaggtgaaaaacggctgacaaaagaagtcctggtatcttctatggtgggagaagaaaactagctaaagggaagaataaattagagaaaaattggaatgactgaatcggaacaaggcaaaggctataaaaaaaattaagcagcagtatcctcttgggggccccttccccacactatctcaatgcaaatatctgtctgaaacggtccctggctaaactccacccatgggttggccagccttgccttgaccaatagccttgacaaggcaaacttgaccaatagtcttagagtatccagtgaggccaggggccggcggctggctagggatgaagaataaaaggaagcacccttcagcagttccacacactcgcttctggaacgtctgaggttatcaataagctcctagtccagacgccatgggtcatttcacagaggaggacaaggctactatcacaagcctgtggggcaaggtgaatgtggaagatgctggaggagaaaccctgggaaggtaggctctggtgaccaggacaagggagggaaggaaggaccctgtgcctggcaaaagtccaggtcgcttctcaggatttgtggcaccttctgactgtcaaactgttcttgtcaatctcacaggctcctggttgtctacccatggacccagaggttctttgacagctttggcaacctgtcctctgcctctgccatcatgggcaaccccaaagtcaaggcacatggcaagaaggtgctgacttccttgggagatgccataaagcacctggatgatctcaagggcacctttgcccagctgagtgaactgcactgtgacaagctgcatgtggatcctgagaacttcaaggtgagtccaggagatgtttcagcactgttgcctttagtctcgaggcaacttagacaactgagtattgatctgagcacagcagggtgtgagctgtttgaagatactggggttgggagtgaagaaactgcagaggactaactgggctgagacccagtggcaatgttttagggcctaaggagtgcctctgaaaatctagatggacaactttgactttgagaaaagagaggtggaaatgaggaaaatgacttttctttattagatttcggtagaaagaactttcacctttcccctatttttgttattcgttttaaaacatctatctggaggcaggacaagtatggtcattaaaaagatgcaggcagaaggcatatattggctcagtcaaagtggggaactttggtggccaaacatacattgctaaggctattcctatatcagctggacacatataaaatgctgctaatgcttcattacaaacttatatcctttaattccagatgggggcaaagtatgtccaggggtgaggaacaattgaaacatttgggctggagtagattttgaaagtcagctctgtgtgtgtgtgtgtgtgtgtgcgcgcgtgtgtttgtgtgtgtgtgagagcgtgtgtttcttttaacgttttcagcctacagcatacagggttcatggtggcaagaagataacaagatttaaattatggccagtgactagtgctgcaagaagaacaactacctgcatttaatgggaaagcaaaatctcaggctttgagggaagttaacataggcttgattctgggtggaagcttggtgtgtagttatctggaggccaggctggagctctcagctcactatgggttcatctttattgtctcctttcatctcaacagctcctgggaaatgtgctggtgaccgttttggcaatccatttcggcaaagaattcacccctgaggtgcaggcttcctggcagaagatggtgactggagtggccagtgccctgtcctccagataccactgagctcactgcccatgatgcagagctttcaaggataggctttattctgcaagcaatcaaataataaatctattctgctaagagatcacacatggttgtcttcagttctttttttatgtctttttaaatatatgagccacaaagggttttatgttgagggatgtgtttatgtgtatttatacatggctatgtgtgtttgtgtcatgtgcacactccacacttttttgtttacgttagatgtgggttttgatgagcaaataaaagaactaggcaataaagaaacttgtacatgggagttctgcaagtgggagtaaaaggtgcaggagaaatctggttggaagaaagacctctataggacaggactcctcagaaacagatgttttggaagagatggggaaaggttcagtgaagggggctgaacccccttccctggattgcagcacagcagcgaggaaggggctcaacgaagaaaaagtgttccaagctttaggaagtcaaggtttaggcagggatagccattctattttattaggggcaatactatttccaacggcatctggcttttctcagcccttgtgaggctctacagggaggttgaggtgttagagatcagagcaggaaacaggtttttctttccacggtaactacaatgaagtgatccttactttactaaggaacttttcattttaagtgttgacgcatgcctaaagaggtgaaattaatcccatacccttaagtctacagactggtcacagcatttcaaggaggagacctcattgtaagcttctagggaggtggggacttaggtgaaggaaatgagccagcagaagctcacaagtcagcatcagcgtgtcatgtctcagcagcagaacagcacggtcagatgaaaatatagtgtgaagaatttgtataacattaattgagaaggcagattcactggagttcttatataattgaaagttaatgcacgttaataagcaagagtttagtttaatgtgatggtgttatgaacttaacgcttgtgtctccagaaaattcacatgctgaatccccaactcccaattggctccatttgtgggggaggctttggaaaagtaatcaggtttagaggagctcatgagagcagatccccatcatagaattattttcctcatcagaagcagagagattagccatttctcttccttctggtgaggacacagtgggaagtcagccacctgcaacccaggaagagagccctgaccaggaaccagcagaaaagtgagaaaaaatcctgttgttgaagtcacccagtctatgctattttgttatagcaccttgcactaagtaaggcagatgaagaaagagaaaaaaataagcttcggtgttcagtggattagaaaccatgtttatctcaggtttacaaatctccacttgtcctctgtgtttcagaataaaataccaactctactactctcatctgtaagatgcaaatagtaagcctgagcccttctgtctaactttgaattctattttttcttcaacgtactttaggcttgtaatgtgtttatatacagtgaaatgtcaagttctttctttatatttctttctttcttttttttcctcagcctcagagttttccacatgcccttcctactttcaggaacttctttctccaaacgtcttctgcctggctccatcaaatcataaaggacccacttcaaatgccatcactcactaccatttcacaattcgcactttctttctttgtcctttttttttttagtaaaacaagtttataaaaaattgaaggaataaatgaatggctacttcataggcagagtagacgcaagggctactggttgccgatttttattgttatttttcaatagtatgctaaacaaggggtagattatttatgctgcccatttttagaccataaaagataacttcctgatgttgccatggcatttttttccttttaattttatttcatttcattttaatttcgaaggtacatgtgcaggatgtgcaggcttgttacatgggtaaatgtgtgtctttctggccttttagccatctgtatcaatgagcagatataagctttacacaggatcatgaaggatgaaagaatttcaccaatattataataatttcaatcaacctgatagcttaggggataaactaatttgaagatacagcttgcctccgataagccagaattccagagcttctggcattataatctagcaaggttagagatcatggatcactttcagagaaaaacaaaaacaaactaaccaaaagcaaaacagaaccaaaaaaccaccataaatacttcctaccctgttaatggtccaatatgtcagaaacagcactgtgttagaaataaagctgtctaaagtacactaatattcgagttataatagtgtgtggactattagtcaataaaaacaacccttgcctctttagagttgttttccatgtacacgcacatcttatgtcttagagtaagattccctgagaagtgaacctagcatttatacaagataattaattctaatccacagtacctgccaaagaacattctaccatcatctttactgagcatagaagagctacgccaaaaccctgggtcatcagccagcacacacacttatccagtggtaaatacacatcatctggtgtatacatacatacctgaatatggaatcaaatatttttctaagatgaaacagtcatgatttatttcaaataggtacggataagtagatattgaggtaagcattaggtcttatattatgtaacactaatctattactgcgctgaaactgtggctttatagaaattgttttcactgcactattgagaaattaagagataatggcaaaagtcacaaagagtatattcaaaaagaagtatagcactttttccttagaaaccactgctaactgaaagagactaagatttgtcccgtcaaaaatcctggacctatgcctaaaacacatttcacaatccctgaacttttcaaaaattggtacatgctttagctttaaactacaggcctcactggagctagagacaagaaggtaaaaaacggctgacaaaagaagtcctggtatcctctatgatgggagaaggaaactagctaaagggaagaataaattagagaaaaactggaatgactgaatcggaacaaggcaaaggctataaaaaaaattagcagtatcctcttgggggccccttccccacactatctcaatgcaaatatctgtctgaaacggtccctggctaaactccacccatgggttggccagccttgccttgaccaatagccttgacaaggcaaacttgaccaatagtcttagagtatccagtgaggccaggggccggcggctggctagggatgaagaataaaaggaagcacccttcagcagttccacacactcgcttctggaacgtctgaggttatcaataagctcctagtccagacgccatgggtcatttcacagaggaggacaaggctactatcacaagcctgtggggcaaggtgaatgtggaagatgctggaggagaaaccctgggaaggtaggctctggtgaccaggacaagggagggaaggaaggaccctgtgcctggcaaaagtccaggtcgcttctcaggatttgtggcaccttctgactgtcaaactgttcttgtcaatctcacaggctcctggttgtctacccatggacccagaggttctttgacagctttggcaacctgtcctctgcctctgccatcatgggcaaccccaaagtcaaggcacatggcaagaaggtgctgacttccttgggagatgccacaaagcacctggatgatctcaagggcacctttgcccagctgagtgaactgcactgtgacaagctgcatgtggatcctgagaacttcaaggtgagtccaggagatgtttcagccctgttgcctttagtctcgaggcaacttagacaacggagtattgatctgagcacagcagggtgtgagctgtttgaagatactggggttgggggtgaagaaactgcagaggactaactgggctgagacccagtggtaatgttttagggcctaaggagtgcctctaaaaatctagatggacaattttgactttgagaaaagagaggtggaaatgaggaaaatgacttttctttattagattccagtagaaagaactttcatctttccctcatttttgttgttttaaaacatctatctggaggcaggacaagtatggtcgttaaaaagatgcaggcagaaggcatatattggctcagtcaaagtggggaactttggtggccaaacatacattgctaaggctattcctatatcagctggacacatataaaatgctgctaatgcttcattacaaacttatatcctttaattccagatgggggcaaagtatgtccaggggtgaggaacaattgaaacatttgggctggagtagattttgaaagtcagctctgtgtgtgtgtgtgtgtgtgcgcgcgcgcgtgtgtgtgtgtgtgtcagcgtgtgtttcttttaacgtcttcagcctacaacatacagggttcatggtggcaagaagatagcaagatttaaattatggccagtgactagtgcttgaaggggaacaactacctgcatttaatgggaaggcaaaatctcaggctttgagggaagttaacataggcttgattctgggtggaagcttggtgtgtagttatctggaggccaggctggagctctcagctcactatgggttcatctttattgtctcctttcatctcaacagctcctgggaaatgtgctggtgaccgttttggcaatccatttcggcaaagaattcacccctgaggtgcaggcttcctggcagaagatggtgactgcagtggccagtgccctgtcctccagataccactgagctcactgcccatgattcagagctttcaaggataggctttattctgcaagcaatacaaataataaatctattctgctgagagatcacacatgattttcttcagctcttttttttacatctttttaaatatatgagccacaaagggtttatattgagggaagtgtgtatgtgtatttctgcatgcctgtttgtgtttgtggtgtgtgcatgctcctcatttatttttatatgagatgtgcattttgatgagcaaataaaagcagtaaagacacttgtacacgggagttctgcaagtgggagtaaatggtgtaggagaaatccggtgggaagaaagacctctataggacaggacttctcagaaacagatgttttggaagagatgggaaaaggttcagtgaagacctgggggctggattgattgcagctgagtagcaaggatggttcttaaggaagggaaagtgttccaagctttaggaattcaaggtttagtcaggtgtagcaattctattttattaggaggaatactatttctaatggcacttagcttttcacagcccttgtggatgcctaagaaagtgaaattaatcccatgccctcaagtgtgcagattggtcacagcatttcaagggagagacctcattgtaagactctgggggaggtggggacttaggtgtaagaaatgaatcagcagaggctcacaagtcagcatgagcatgttatgtctgagaaacagaccagcactgtgagatcaaaatgtagtgggaagaatttgtacaacattaattggaaggcttacttaatggaatttttgtatagttggatgttagtgcatctctataagtaagagtttaatatgatggtgttacggacctaatgtttgtgtctcctcaaaattcacatgctgaatccccaactcccaactgaccttatctgtgggggaggcttttgaaaagtaattaggtttagatgagctcataagagcagatccccatcataaaattattttccttatcagaagcagagagacaagccatttctctttcctcccggtgaggacacagtgagaagtccgccatctgcaatccaggaagagaaccctgaccacgagtcagccttcagaaatgtgagaaaaaactctgttgttgaagccacccagtcttttgtattttgttatagcaccttgcactgagtaaggcagatgaagaaggagaaaaaaataagcttgggttttgagtggactacagaccatgtttatctcaggtttgcaaagctcccctcgtcccctatgtttcagtataaaatacctactctactactctcatctataagacccaaataataagcctgcgcccttctctctaactttgatttctcctatttttacttcaacatgctttactctagccttgtaatgtctttacatacagtgaaatgtaaagttctttattctttttttctttctttcttttttctcctcagcctcagaatttggcacatgcccttccttctttcaggaacttctccaacatctctgcctggctccatcatatcataaaggtcccacttcaaatgcagtcactaccgtttcagaatatgcactttctttcttttttgttttttgttttttttaagtcaaagcaaatttcttgagagagtaaagaaataaacgaatgactactgcataggcagagcagccccgagggccgctggttgttccttttatggttatttcttgatgatatgttaaacaagttttggattatttatgccttctctttttaggccatatagggtaactttctgacattgccatggcatttttcttttaatttaatttactgttaccttaaattcaggggtacacgtacaggatatgcaggtttgttttataggtaaaagtgtgccatggttttaatgggttttttttttcttgtaaagttgtttaagtttcttgtttactctggatattaggcctttgtcagaagaatagattggaaaatctttttcccattctgtagattgtctttcgctctgatggtagtttcttttgctgagcaggagctctttagtttaattagattccattggtcaatttttgcttttgctgcaattgcttttcacgctttcatcatgaaatctgtgcccgtgtttatatcatgaatagtattgccttgatttttttctaggctttttatagtttggggtttttcatttaagtctctaatccatctggagttaattttggataaggtataaggaaggagtccagtttcatttttcagcatatggctagccagttctcccccatcatttattaaattgaaaatcctttccccattgcttgcttttgtcaggtttctaaaagaccagatggttgtaggtacaatatgcagtttcttcaagtcatataataccatctgaaatctcttattaattcatttcttttagtatgtatgctggtctcctctgctcactatagtgagggcaccattagccagagaatctgtctgtctagttcatgtaagattctcagaattaagaaaaatggatggcatatgaatgaaacttcatggatgacatatggaatctaatatgtatttgttgaattaatgcataagatgcaacagagagaagttgacaactgcaatgataacctggtattgatgatataagagtctatagatcacagtagaagcaataatcatggaaaacaattggaaatggggaacagccacaaacaagaaagaatcaatacttccaggaaagtgactgcaggtcacttttcctggagcgggtgagagaaaagtggaagttagcagtaactgctgaattcctggttggctgatggaaagatggggcagctgttcactggtacgcagggttttagatgtatgtacctaaggatatgaggtatggcaatgaacagaaattcttttgggaatgagttttagggccattaaaggacatgacctgaagtttcctctgaggccagtccccacaactcaatataaatgtgtttcctgcatatagtcaaagttgccacttctttttcttcatatcatcgatctctgctcttaaagataatcttggttttgcctcaaactgtttgtcactacaaactttccccatgttcctaagtaaaacaggtaactgcctctcaactatatcaagtagactaaaatattgtgtctctaatatcagaaattcagctttaatatattgggtttaactctttgaaatttagagtctccttgaaatacacatgggggtgatttcctaaactttatttcttgtaaggatttatctcaggggtaacacacaaaccagcatcctgaacctctaagtatgaggacagtaagccttaagaatataaaataaactgttcttctctctgccggtggaagtgtgccctgtctattcctgaaattgcttgtttgagacgcatgagacgtgcagcacatgagacacgtgcagcagcctgtggaatattgtcagtgaagaatgtctttgcctgattagatataaagacaagttaaacacagcattagactatagatcaagcctgtgccagacacaaatgacctaatgcccagcacgggccacggaatctcctatcctcttgcttgaacagagcagcacacttctcccccaacactattagatgttctggcataattttgtagatatgtaggatttgacatggactattgttcaatgattcagaggaaatctcctttgttcagataagtacactgactactaaatggattaaaaaacacagtaataaaacccagttttccccttacttccctagtttgtttcttattctgctttcttccaagttgatgctggatagaggtgtttatttctattctaaaaagtgatgaaattggccgggcgcggtggctcacacctgtaatcccagcactttgggaggctgaggtgggcggatcacgaggtcaggagatcaagaccatcctggctaacatggtgaaaccccatctctactaaaaatacaaaaaattagccagagacagtggcgggtgcctgtagtcccagctactcgggaggctgaggcaggagaatggcgtgaacctgggaggcagagcttgcggtgagcagagatcgcgccactgcacactccagcctgggtgacaaagcgagactccatctcaaaaaaaaaaaaaaaaaaaagaaaaagaaagaaagaaagaaaaaaaaactgatgaaattgtgtattcaatgtagtctcaagagaattgaaaaccaagaaaggctgtggcttcttccacataaagcctggatgaataacaggataacacgttgttacattgtcacaactcctgatccaggaattgatggctaagatattcgtaattcttatccttttcagttgtaacttattcctatttgtcagcattcaggttattagcggctgctggcgaagtccttgagaaataaactgcacactggatggtgggggtagtgtaggaaaatggaggggaaggaagtaaagtttcaaattaagcctgaacagcaaagttcccctgagaaggccacctggattctatcagaaactcgaatgtccatcttgcaaaacttccttgcccaaaccccacccctggagtcacaacccacccttgaccaatagattcattttactgagggaggcaaagggctggtcaatagattcatttcactgggagaggcaaagggctgggggccagagaggagaagtaaaaagccacacatgaagcagcaatgcaggcatgcttctggctcatctgtgatcaccaggaaactcccagatctgacactgtagtgcatttcactgctgacaagaaggctgctgccaccagcctgtgaagcaaggttaaggtgagaaggctggaggtgagattctgggcaggtaggtactggaagccgggacaaggtgcagaaaggcagaaagtgtttctgaaagagggattagcccgttgtcttacatagtctgactttgcacctgctctgtgattatgactatcccacagtctcctggttgtctacccatggacctagaggtactttgaaagttttggatatctgggctctgactgtgcaataatgggcaaccccaaagtcaaggcacatggcaagaaggtgctgatctccttcggaaaagctgttatgctcacggatgacctcaaaggcacctttgctacactgagtgacctgcactgtaacaagctgcacgtggaccctgagaacttcctggtgagtagtaagtacactcacgctttcttctttacccttagatatttgcactatgggtacttttgaaagcagaggtggctttctcttgtgttatgagtcagctatgggatatgatatttcagcagtgggattttgagagttatgttgctgtaaataacataactaaaatttggtagagcaaggactatgaataatggaaggccacttaccatttgatagctctgaaaaacacatcttataaaaaattctggccaaaatcaaactgagtgtttttggatgagggaacagaagttgagatagagaaaataacatctttcctttggtcagcgaaattttctataaaaattaatagtcacttttctgcatagtcctggaggttagaaaaagatcaactgaacaaagtagtgggaagctgttaaaaagaggattgtttccctccgaatgatgatggtatacttttgtacgcatggtacaggattctttgttatgagtgtttgggaaaattgtatgtatgtatgtatgtatgtatgtgatgactggggacttatcctatccattactgttccttgaagtactattatcctactttttaaaaggacgaagtctctaaaaaaaaaatgaaacaatcacaatatgttggggtagtgagttggcatagcaagtaagagaaggataggacacaatgggaggtgcagggctgccagtcatattgaagctgatatctagcccataatggtgagagttgctcaaactctggtgaaaaaggatgtaagtgttatatctatttactgcaagtccagcttgaggccttctattcactatgtaccattttcttttttatcttcactccctccccagctcttaggcaacgtgatattgattgttttggcaacccacttcagcgaggattttaccctacagatacaggcttcttggcagtaactaacaaatgctgtggttaatgctgtagcccacaagaccactgagttccctgtccactatgtttgtacctatggtccactatgtttgtacctatgtcccaaaatctcatctcctttagatgggggaggttggggagaagagcagtatcctgcctgctgattcagttcctgcatgataaaaatagaataaagaaatatgctctctaagaaatatcattgtactctttttctgtctttatattttaccctgattcagccaaaaggacgcactatttctgatggaaatgagaatgttggagaatgggagtttaaggacagagaagatactttcttgcaatcctgcaagaaaagagagaactcgtgggtggatttagtggggtagttactcctaggaaggggaaatcgtctctagaataagacaatgtttttacagaaagggaggtcaatggaggtactctttggaggtgtaagaggattgttggtagtgtgtagaggtatgttaggactcaaattagaagttctgtataggctattatttgtatgaaactcaggatatagctcatttggtgactgcagttcacttctacttattttaaacaacatattttttattatttataatgaagtggggatggggcttcctagagaccaatcaagggccaaaccttgaactttctcttaacgtcttcaatggtattaatagagaattatctctaaggcatgtgaactggctgtcttggttttcatctgtacttcatctgctacctctgtgacctgaaacatatttataattccattaagctgtgcatatgatagatttatcatatgtattttccttaaaggatttttgtaagaactaattgaattgatacctgtaaagtctttatcacactacccaataaataataaatctctttgttcagctctctgtttctataaatatgtacaagttttattgtttttagtggtagtga

SEQ ID NO: 514 - DNA, 25591 bp, Homo sapiens
tcactaccactaaaaacaataaaacttgtacatatttatagaaacagagagctgaacaaagagatttattatttattgggtagtgtgataaagactttacaggtatcaattcaattagttcttacaaaaatcctttaaggaaaatacatatgataaatctatcatatgcacagcttaatggaattataaatatgtttcaggtcacagaggtagcagatgaagtacagatgaaaaccaagacagccagttcacatgccttagagataattctctattaataccattgaagacgttaagagaaagttcaaggtttggcccttgattggtctctaggaagccccatccccacttcattataaataataaaaaatatgttgtttaaaataagtagaagtgaactgcagtcaccaaatgagctatatcctgagtttcatacaaataatagcctatacagaacttctaatttgagtcctaacatacctctacacactaccaacaatcctcttacacctccaaagagtacctccattgacctccctttctgtaaaaacattgtcttattctagagacgatttccccttcctaggagtaactaccccactaaatccacccacgagttctctcttttcttgcaggattgcaagaaagtatcttctctgtccttaaactcccattctccaacattctcatttccatcagaaatagtgcgtccttttggctgaatcagggtaaaatataaagacagaaaaagagtacaatgatatttcttagagagcatatttctttattctatttttatcatgcaggaactgaatcagcaggcaggatactgctcttctccccaacctcccccatctaaaggagatgagattttgggacataggtacaaacatagtggaccataggtacaaacatagtggacagggaactcagtggtcttgtgggctacagcattaaccacagcatttgttagttactgccaagaagcctgtatctgtagggtaaaatcctcgctgaagtgggttgccaaaacaatcaatatcacgttgcctaagagctggggagggagtgaagataaaaaagaaaatggtacatagtgaatagaaggcctcaagctggacttgcagtaaatagatataacacttacatcctttttcaccagagtttgagcaactctcaccattatgggctagatatcagcttcaatatgactggcagccctgcacctcccattgtgtcctatccttctcttacttgctatgccaactcactaccccaacatattgtgattgtttcattttttttttagagacttcgtccttttaaaaagtaggataatagtacttcaaggaacagtaatggataggataagtccccagtcatcacatacatacatacatacatacatacaattttcccaaacactcataacaaagaatcctgtaccatgcgtacaaaagtataccatcatcattcggagggaaacaatcctctttttaacagcttcccactactttgttcagttgatctttttctaacctccaggactatgcagaaaagtgactattaatttttatagaaaatttcgctgaccaaaggaaagatgttattttctctatctcaacttctgttccctcatccaaaaacactcagtttgattttggccagaattttttataagatgtgtttttcagagctatcaaatggtaagtggccttccattattcatagtccttgctctaccaaattttagttatgttatttacagcaacataactctcaaaatcccactgctgaaatatcatatcccatagctgactcataacacaagagaaagccacctctgctttcaaaagtacccatagtgcaaatatctaagggtaaagaagaaagcgtgagtgtacttactactcaccaggaagttctcagggtccacgtgcagcttgttacagtgcaggtcactcagtgtagcaaaggtgcctttgaggtcatccgtgagcataacagcttttccgaaggagatcagcaccttcttgccatgtgccttgactttggggttgcccattattgcacagtcagagcccagatatccaaaactttcaaagtacctctaggtccatgggtagacaaccaggagactgtgggatagtcataatcacagagcaggtgcaaagtcagactatgtaagacaacgggctaatccctctttcagaaacactttctgcctttctgcaccttgtcccggcttccagtacctacctgcccagaatctcacctccagccttctcaccttaaccttgcttcacaggctggtggcagcagccttcttgtcagcagtgaaatgcactacagtgtcagatctgggagtttcctggtgatcacagatgagccagaagcatgcctgcattgctgcttcatgtgtggctttttacttctcctctctggcccccagccctttgcctctcccagtgaaatgaatctattgaccagccctttgcctccctcagtaaaatgaatctattggtcaagggtgggttgtgactccaggggtggggtttgggcaaggaagttttgcaagatggacattcgagtttctgatagaatccaggtggccttctcaggggaactttgctgttcaggcttaatttgaaactttacttccttcccctccattttcctacactacccccaccatccagtgtgcagtttatttctcaaggacttcgccagcagccgctaataacctgaatgctgacaaataggaataagttacaactgaaaaggataagaattacgaatatcttagccatcaattcctggatcaggagttgtgacaatgtaacaacgtgttatcctgttattcatccaggctttatgtggaagaagccacagcctttcttggttttcaattctcttgagactacattgaatacacaatttcatcagtttttttttctttctttctttctttttcttttttttttttttttttttgagatggagtctcgctttgtcacccaggctggagtgtgcagtggcgcgatctctgctcaccgcaagctctgcctcccaggttcacgccattctcctgcctcagcctcccgagtagctgggactacaggcacccgccactgtctctggctaattttttgtatttttagtagagatggggtttcaccatgttagccaggatggtcttgatctcctgacctcgtgatccgcccacctcagcctcccaaagtgctgggattacaggtgtgagccaccgcgcccggccaatttcatcactttttagaatagaaataaacacctctatccagcatcaacttggaagaaagcagaataagaaacaaactagggaagtaaggggaaaactgggttttattactgtgttttttaatccatttagtagtcagtgtacttatctgaacaaaggagatttcctctgaatcattgaacaatagtccatgtcaaatcctacatatctacaaaattatgccagaacatctaatagtgttgggggagaagtgtgctgctctgttcaagcaagaggataggagattccgtggcccgtgctgggcattaggtcatttgtgtctggcacaggcttgatctatagtctaatgctgtgtttaacttgtctttatatctaatcaggcaaagacattcttcactgacaatattccacaggctgctgcacgtgtctcatgtgctgcacgtctcatgcgtctcaaacaagcaatttcaggaatagacagggcacacttccaccggcagagagaagaacagtttattttatattcttaaggcttactgtcctcatacttagaggttcaggatgctggtttgtgtgttacccctgagataaatccttacaagaaataaagtttaggaaatcacccccatgtgtatttcaaggagactctaaatttcaaagagttaaacccaatatattaaagctgaatttctgatattagagacacaatattttagtctacttgatatagttgagaggcagttacctgttttacttaggaacatggggaaagtttgtagtgacaaacagtttgaggcaaaaccaagattatctttaagagcagagatcgatgatatgaagaaaaagaagtggcaactttgactatatgcaggaaacacatttatattgagttgtggggactggcctcagaggaaacttcaggtcatgtcctttaatggccctaaaactcattcccaaaagaatttctgttcattgccatacctcatatccttaggtacatacatctaaaaccctgcgtaccagtgaacagctgccccatctttccatcagccaaccaggaattcagcagttactgctaacttccacttttctctcacccgctccaggaaaagtgacctgcagtcactttcctggaagtattgattctttcttgtttgtggctgttccccatttccaattgttttccatgattattgcttctactgtgatctatagactcttatatcatcaataccaggttatcattgcagttgtcaacttctctctgttgcatcttatgcattaattcaacaaatacatattagattccatatgtcatccatgaagtttcattcatatgccatccatttttcttaattctgagaatcttacatgaactagacagacagattctctggctaatggtgccctcactatagtgagcagaggagaccagcatacatactaaaagaaatgaattaataagagatttcagatggtattatatgacttgaagaaactgcatattgtacctacaaccatctggtcttttagaaacctgacaaaagcaagcaatggggaaaggattttcaatttaataaatgatgggggagaactggctagccatatgctgaaaaatgaaactggactccttccttataccttatccaaaattaactccagatggattagagacttaaatgaaaaaccccaaactataaaaagcctagaaaaaaatcaaggcaatactattcatgatataaacacgggcacagatttcatgatgaaagcgtgaaaagcaattgcagcaaaagcaaaaattgaccaatggaatctaattaaactaaagagctcctgctcagcaaaagaaactaccatcagagcgaaagacaatctacagaatgggaaaaagattttccaatctattcttctgacaaaggcctaatatccagagtaaacaagaaacttaaacaactttacaagaaaaaaaaaacccattaaaaccatggcacacttttacctataaaacaaacctgcatatcctgtacgtgtacccctgaatttaaggtaacagtaaattaaattaaaagaaaaatgccatggcaatgtcagaaagttaccctatatggcctaaaaagagaaggcataaataatccaaaacttgtttaacatatcatcaagaaataaccataaaaggaacaaccagcggccctcggggctgctctgcctatgcagtagtcattcgtttatttctttactctctcaagaaatttgctttgacttaaaaaaaacaaaaaacaaaaaagaaagaaagtgcatattctgaaacggtagtgactgcatttgaagtgggacctttatgatatgatggagccaggcagagatgttggagaagttcctgaaagaaggaagggcatgtgccaaattctgaggctgaggagaaaaaagaaagaaagaaaaaaagaataaagaactttacatttcactgtatgtaaagacattacaaggctagagtaaagcatgttgaagtaaaaataggagaaatcaaagttagagagaagggcgcaggcttattatttgggtcttatagatgagagtagtagagtaggtattttatactgaaacataggggacgaggggagctttgcaaacctgagataaacatggtctgtagtccactcaaaacccaagcttatttttttctccttcttcatctgccttactcagtgcaaggtgctataacaaaatacaaaagactgggtggcttcaacaacagagttttttctcacatttctgaaggctgactcgtggtcagggttctcttcctggattgcagatggcggacttctcactgtgtcctcaccgggaggaaagagaaatggcttgtctctctgcttctgataaggaaaataattttatgatggggatctgctcttatgagctcatctaaacctaattacttttcaaaagcctcccccacagataaggtcagttgggagttggggattcagcatgtgaattttgaggagacacaaacattaggtccgtaacaccatcatattaaactcttacttatagagatgcactaacatccaactatacaaaaattccattaagtaagccttccaattaatgttgtacaaattcttcccactacattttgatctcacagtgctggtctgtttctcagacataacatgctcatgctgacttgtgagcctctgctgattcatttcttacacctaagtccccacctcccccagagtcttacaatgaggtctctcccttgaaatgctgtgaccaatctgcacacttgagggcatgggattaatttcactttcttaggcatccacaagggctgtgaaaagctaagtgccattagaaatagtattcctcctaataaaatagaattgctacacctgactaaaccttgaattcctaaagcttggaacactttcccttccttaagaaccatccttgctactcagctgcaatcaatccagcccccaggtcttcactgaaccttttcccatctcttccaaaacatctgtttctgagaagtcctgtcctatagaggtctttcttcccaccggatttctcctacaccatttactcccacttgcagaactcccgtgtacaagtgtctttactgcttttatttgctcatcaaaatgcacatctcatataaaaataaatgaggagcatgcacacaccacaaacacaaacaggcatgcagaaatacacatacacacttccctcaatataaaccctttgtggctcatatatttaaaaagatgtaaaaaaaagagctgaagaaaatcatgtgtgatctctcagcagaatagatttattatttgtattgcttgcagaataaagcctatccttgaaagctctgaatcatgggcagtgagctcagtggtatctggaggacagggcactggccactgcagtcaccatcttctgccaggaagcctgcacctcaggggtgaattctttgccgaaatggattgccaaaacggtcaccagcacatttcccaggagctgttgagatgaaaggagacaataaagatgaacccatagtgagctgagagctccagcctggcctccagataactacacaccaagcttccacccagaatcaagcctatgttaacttccctcaaagcctgagattttgccttcccattaaatgcaggtagttgttccccttcaagcactagtcactggccataatttaaatcttgctatcttcttgccaccatgaaccctgtatgttgtaggctgaagacgttaaaagaaacacacgctgacacacacacacacacgcgcgcgcgcacacacacacacacacacagagctgactttcaaaatctactccagcccaaatgtttcaattgttcctcacccctggacatactttgcccccatctggaattaaaggatataagtttgtaatgaagcattagcagcattttatatgtgtccagctgatataggaatagccttagcaatgtatgtttggccaccaaagttccccactttgactgagccaatatatgccttctgcctgcatctttttaacgaccatacttgtcctgcctccagatagatgttttaaaacaacaaaaatgagggaaagatgaaagttctttctactggaatctaataaagaaaagtcattttcctcatttccacctctcttttctcaaagtcaaaattgtccatctagatttttagaggcactccttaggccctaaaacattaccactgggtctcagcccagttagtcctctgcagtttcttcacccccaaccccagtatcttcaaacagctcacaccctgctgtgctcagatcaatactccgttgtctaagttgcctcgagactaaaggcaacagggctgaaacatctcctggactcaccttgaagttctcaggatccacatgcagcttgtcacagtgcagttcactcagctgggcaaaggtgcccttgagatcatccaggtgctttgtggcatctcccaaggaagtcagcaccttcttgccatgtgccttgactttggggttgcccatgatggcagaggcagaggacaggttgccaaagctgtcaaagaacctctgggtccatgggtagacaaccaggagcctgtgagattgacaagaacagtttgacagtcagaaggtgccacaaatcctgagaagcgacctggacttttgccaggcacagggtccttccttccctcccttgtcctggtcaccagagcctaccttcccagggtttctcctccagcatcttccacattcaccttgccccacaggcttgtgatagtagccttgtcctcctctgtgaaatgacccatggcgtctggactaggagcttattgataacctcagacgttccagaagcgagtgtgtggaactgctgaagggtgcttccttttattcttcatccctagccagccgccggcccctggcctcactggatactctaagactattggtcaagtttgccttgtcaaggctattggtcaaggcaaggctggccaacccatgggtggagtttagccagggaccgtttcagacagatatttgcattgagatagtgtggggaaggggcccccaagaggatactgctaattttttttatagcctttgccttgttccgattcagtcattccagtttttctctaatttattcttccctttagctagtttccttctcccatcatagaggataccaggacttcttttgtcagccgttttttaccttcttgtctctagctccagtgaggcctgtagtttaaagctaaagcatgtaccaatttttgaaaagttcagggattgtgaaatgtgttttaggcataggtccaggatttttgacgggacaaatcttagtctctttcagttagcagtggtttctaaggaaaaagtgctatacttctttttgaatatactctttgtgacttttgccattatctcttaatttctcaatagtgcagtgaaaacaatttctataaagccacagtttcagcgcagtaatagattagtgttacataatataagacctaatgcttacctcaatatctacttatccgtacctatttgaaataaatcatgactgtttcatcttagaaaaatatttgattccatattcaggtatgtatgtatacaccagatgatgtgtatttaccactggataagtgtgtgtgctggctgatgacccagggttttggcgtagctcttctatgctcagtaaagatgatggtagaatgttctttggcaggtactgtggattagaattaattatcttgtataaatgctaggttcacttctcagggaatcttactctaagacataagatgtgcgtgtacatggaaaacaactctaaagaggcaagggttgtttttattgactaatagtccacacactattataactcgaatattagtgtactttagacagctttatttctaacacagtgctgtttctgacatattggaccattaacagggtaggaagtatttatggtggttttttggttctgttttgcttttggttagtttgtttttgtttttctctgaaagtgatccatgatctctaaccttgctagattataatgccagaagctctggaattctggcttatcggaggcaagctgtatcttcaaattagtttatcccctaagctatcaggttgattgaaattattataatattggtgaaattctttcatccttcatgatcctgtgtaaagcttatatctgctcattgatacagatggctaaaaggccagaaagacacacatttacccatgtaacaagcctgcacatcctgcacatgtaccttcgaaattaaaatgaaatgaaataaaattaaaaggaaaaaaatgccatggcaacatcaggaagttatcttttatggtctaaaaatgggcagcataaataatctaccccttgtttagcatactattgaaaaataacaataaaaatcggcaaccagtagcccttgcgtctactctgcctatgaagtagccattcatttattccttcaattttttataaacttgttttactaaaaaaaaaaaggacaaagaaagaaagtgcgaattgtgaaatggtagtgagtgatggcatttgaagtgggtcctttatgatttgatggagccaggcagaagacgtttggagaaagaagttcctgaaagtaggaagggcatgtggaaaactctgaggctgaggaaaaaaaagaaagaaagaaatataaagaaagaacttgacatttcactgtatataaacacattacaagcctaaagtacgttgaagaaaaaatagaattcaaagttagacagaagggctcaggcttactatttgcatcttacagatgagagtagtagagttggtattttattctgaaacacagaggacaagtggagatttgtaaacctgagataaacatggtttctaatccactgaacaccgaagcttatttttttctctttcttcatctgccttacttagtgcaaggtgctataacaaaatagcatagactgggtgacttcaacaacaggattttttctcacttttctgctggttcctggtcagggctctcttcctgggttgcaggtggctgacttcccactgtgtcctcaccagaaggaagagaaatggctaatctctctgcttctgatgaggaaaataattctatgatggggatctgctctcatgagctcctctaaacctgattacttttccaaagcctcccccacaaatggagccaattgggagttggggattcagcatgtgaattttctggagacacaagcgttaagttcataacaccatcacattaaactaaactcttgcttattaacgtgcattaactttcaattatataagaactccagtgaatctgccttctcaattaatgttatacaaattcttcacactatattttcatctgaccgtgctgttctgctgctgagacatgacacgctgatgctgacttgtgagcttctgctggctcatttccttcacctaagtccccacctccctagaagcttacaatgaggtctcctccttgaaatgctgtgaccagtctgtagacttaagggtatgggattaatttcacctctttaggcatgcgtcaacacttaaaatgaaaagttccttagtaaagtaaggatcacttcattgtagttaccgtggaaagaaaaacctgtttcctgctctgatctctaacacctcaacctccctgtagagcctcacaagggctgagaaaagccagatgccgttggaaatagtattgcccctaataaaatagaatggctatccctgcctaaaccttgacttcctaaagcttggaacactttttcttcgttgagccccttcctcgctgctgtgctgcaatccagggaagggggttcagcccccttcactgaacctttccccatctcttccaaaacatctgtttctgaggagtcctgtcctatagaggtctttcttccaaccagatttctcctgcaccttttactcccacttgcagaactcccatgtacaagtttctttattgcctagttcttttatttgctcatcaaaacccacatctaacgtaaacaaaaaagtgtggagtgtgcacatgacacaaacacacatagccatgtataaatacacataaacacatccctcaacataaaaccctttgtggctcatatatttaaaaagacataaaaaaagaactgaagacaaccatgtgtgatctcttagcagaatagatttattatttgattgcttgcagaataaagcctatccttgaaagctctgcatcatgggcagtgagctcagtggtatctggaggacagggcactggccactccagtcaccatcttctgccaggaagcctgcacctcaggggtgaattctttgccgaaatggattgccaaaacggtcaccagcacatttcccaggagctgttgagatgaaaggagacaataaagatgaacccatagtgagctgagagctccagcctggcctccagataactacacaccaagcttccacccagaatcaagcctatgttaacttccctcaaagcctgagattttgctttcccattaaatgcaggtagttgttcttcttgcagcactagtcactggccataatttaaatcttgttatcttcttgccaccatgaaccctgtatgctgtaggctgaaaacgttaaaagaaacacacgctctcacacacacacaaacacacgcgcgcacacacacacacacacacacagagctgactttcaaaatctactccagcccaaatgtttcaattgttcctcacccctggacatactttgcccccatctggaattaaaggatataagtttgtaatgaagcattagcagcattttatatgtgtccagctgatataggaatagccttagcaatgtatgtttggccaccaaagttccccactttgactgagccaatatatgccttctgcctgcatctttttaatgaccatacttgtcctgcctccagatagatgttttaaaacgaataacaaaaataggggaaaggtgaaagttctttctaccgaaatctaataaagaaaagtcattttcctcatttccacctctcttttctcaaagtcaaagttgtccatctagattttcagaggcactccttaggccctaaaacattgccactgggtctcagcccagttagtcctctgcagtttcttcactcccaaccccagtatcttcaaacagctcacaccctgctgtgctcagatcaatactcagttgtctaagttgcctcgagactaaaggcaacagtgctgaaacatctcctggactcaccttgaagttctcaggatccacatgcagcttgtcacagtgcagttcactcagctgggcaaaggtgcccttgagatcatccaggtgctttatggcatctcccaaggaagtcagcaccttcttgccatgtgccttgactttggggttgcccatgatggcagaggcagaggacaggttgccaaagctgtcaaagaacctctgggtccatgggtagacaaccaggagcctgtgagattgacaagaacagtttgacagtcagaaggtgccacaaatcctgagaagcgacctggacttttgccaggcacagggtccttccttccctcccttgtcctggtcaccagagcctaccttcccagggtttctcctccagcatcttccacattcaccttgccccacaggcttgtgatagtagccttgtcctcctctgtgaaatgacccatggcgtctggactaggagcttattgataacctcagacgttccagaagcgagtgtgtggaactgctgaagggtgcttccttttattcttcatccctagccagccgccggcccctggcctcactggatactctaagactattggtcaagtttgccttgtcaaggctattggtcaaggcaaggctggccaacccatgggtggagtttagccagggaccgtttcagacagatatttgcattgagatagtgtggggaaggggcccccaagaggatactgctgcttaattttttttatagcctttgccttgttccgattcagtcattccaatttttctctaatttattcttccctttagctagttttcttctcccaccatagaagataccaggacttcttttgtcagccgtttttcaccttcttgtctgtagctccagtgaggcctgtagtttaaagttaaagcatgtaccaatttttgaaaagttcagggattgtgaaatgtgttttaggcataggtccaggatttttgatgggacacgtcttagtctcatttagtaagcattggtttccaaataagaagtgctatacttatctttgaatatactctctgtggttttaggccattatctcttaagttctcattagtgtagtgaaaaatcctataaagcaacagtttcagtgcaggaatagattaatgttatgtaatataatataagactgaatccttacttcaatatctacttatccgtacctatttgaaataaatcacgcctgtttcatctcagcaaaagtattttttttatattcaggtatgtatgtaggcacccgatgatgtgtatttatcactggataagtgtatgtgctggctgatgacccagggttttggtgtagctcttctatgctcggtaaagatgatggtagaatgctctttaccagatactatggattagaattaattatcttgtataaatgctaggttcacttcttagggaatcttattctaagacataagacatgtatttgcatggaaaacaactcttaagaggcagggactgttttattgactaatagtccacacactgtgacagctgggatgtcactgtagtttagacatctttatctgtaactcagtgctgtttctgacatattggccacttaacatggcaggaagtattcatgctgtttttttctttattttttctttgggatttttattttttggtaggtttggttttgcttttgttttttctctgaactcgatccatgaccttggtagattatgacgtcagaaactctggaaatctggcttattggaggagagctctaccttcccctaacctatcaggttgataggaattataataatattggtggaatcctttcagacttcataatcctgtgtaaggcttatatctgctcaaagtgttaggcggctaaaagaccagaaagatacatgttgacctgcgcaacaaagctgcacatattgcacttgttctttggaagttaaaataaaagttgaataagaaaggaaagaaaaagatttgtcaacttatcagtatcttccagttactcacataataataagtgacttctctcaatctaaggatgggtgagaaagatttttattggtatgctggtacagattatagagactgaggtgaacccaaattagggtctctttaagataggggatctgtgagatgggtgtgtatagatctttggccatatctgagagtctggttgggttccatttgtagagcctgacctttaagaatgtgtcagagactggtgtctaagcccgctaaggcctaaacaagtgaatcttttgaatctctcttttttttttttgagacagagtcttgttctgtcacccaggctggagtgcagtggtatgatctcggctcactgcaactcctgccttccaggttcaagcaattctccttcctcagcctcccaagtagctgggattacaggcacttgccatcatgcctgtctaatttttgtatttttgtagagatgggatttcaccatgttggccaggttggtcttgaactcttgacctcaggtgatctgcctgccttggcctcccaaaattctgggattacaggcgtgagccaccactcccagcctctaaacaagtgaatcttaattgctcctcctcagactaaggaatatctaggatccctcctgttttcaaacaacttccccatttatccaaaaaccaaggcagtgttctaaaagtcatgtataaacccttatttcctcttatgcttttgaggcaatatcttttaagagtttgttgatttctccttatccataactgtcttattcctcgatttttcctatatcattgcttctgacattgattaaatcctaactgataaaactgtttctttacacaagcaatttcaagtgttttcaagcattctttcccatgtattttcaaacatttgttcagcaaatatctgttaaataaatgtcataatttttaaagtagtgggcatttaagttaaataagtcagagaataaaactttcctctgaagattataatctaggtagaacatacataaaattaataattaagttaaacaacaaaataatttcagatattattaactaagaatgaaattaaggagaaagtattcgaacagaggcaaaatgacagaaggaatctgccatgggaaggcattgccaaataaagtttagaagctgaaatagtaaattcaaagctctgaagcagaagaaaacaaactcctgctgtgccagagagttagataaagaaccagtgccgttgatatgtaaagtggagaatagcaggtggtattgtttcagggaagcataaacctaaggacataaacttgtcctcagtggtagggagtgagaagccattatagaattttaactctggtaatgacataatctctaagcaacctgtactattggctggattactattctaagaatgacctgtttatcacaactgttttgcttaaaaagcccttattgcctgtggacaattattagttattctttcaactattaaaaatcttgtcatgcagatgtgtgtgtgtgtgtgtgtattcattatgaatttgctttcaattaagttatcttgaattggcaatatctaaatctagatatagctccctaaggggtaaagagtgtatccactgcccacccctcaacatcacgtccttgattccttgatatcaaagggcagtatagttttgggggagaagaaaaagagagagagagaaaaaaagattgattaaaaatgcatattaccgacaaattagagggtgatggcagatgggaggcagcagaagtacattgcagctcccactcggatgcacagagcagcatgtgaagtctcccatcaggaattttttttgcagaaccacctgcagaaataaatcaagaaagctgagagaacgcacacaccctctgaaagaagcagattgctcctgcaggacccgggaaacaccccaaatattgtgagtgcccaaactgtggaagtggaaaagggggaccgtctacccccaaacacacatcctcactggggaacctgaagatctagaccacaggagaagattctgaccttacctggagctgagtcaatttagagggccaagcaaaatacaggggtagaggaagcagcgggaaaagccctgtgggctctctgggtcccctaggaagccatttctgccttgcctcacaggggtcatttgggagggctgccagaggaactgggaaaagatgacaggaaaaagaaaatctccacctggccagatctaggggctgggcagtgggggggttggtggggggacatgaatttggtgtgcagactccactggcagggaagtaggacagccctacttggtttcgcagctggtagcctggggcaagttctcagccttgctcactgactgcatggaaacagattcggtgctgttgcgggggagggtgcacgctggaagtgagaccaaccttttgagttgcatgggagctgggcaagtcacgtgactgcttgctttcccccactttcctgatgacctgcatgacacagcagaggcagccataattgtcctaggaacataaatccattgacctggaaactacacccccatcctcccacagtagccacagaaagacctgcccaaggagactctgagctcagacacgactagtcctgcccccacctgatggtccttccttactcaccctggtagctgaagacaaagggcatatattcttgggagttctagggtgccccagcccccccagccaccaccacctgactgcctctgctgatgctttctagaaagtgccacctcctggcaggaggccaaccagcacaaaaatagtgcattgaacaaccaaaagtaaggaccctcacagagtccatttcatcctctgccacctccattggagcaggtggttgtatctatggctgagagacccacagatggttcacgtcacaagactctgtgcagacaaaccccagtaccagcctggagtctggtagacctgatgggtggctagatccagaagagagataacaatcactacagttcggctctcaggaagccccacgcctaggaaaagggggactgtgctacatcaagggaacacctcatgggacaaaagtctcagccttgaggcctagactttccctctgacagagcctacccaagtgagaaggaaccagaaaactaactctggtaatatgaaaaacaaggttctttaacaccccccaaaaaatcatactagctcaccagcaatgcatccaaaccaagaagaaatccctgatttacctgaaaaataattcagaaggtcagttattaagctaatcaaggaggcatccgaggaaggtgaagtccaattttaaaaaaaccaaaaatatgatacaagaaatgaggggagaaatcttcagttaaagagatagcataaataaaaaacattcaaaacttcaggaaacaatggatgaatggatgcacttatagaaatgcaaaatgctctagaaagtctcagcaatagaatccaagcagaagaaattcagagcttgaagacaaagtttttgaattaacccaatccaacaaagacaaagaaaaaagaataagaaaatatgaacaaagcctccaagaaatctgggattatgttaaacaatcaaacctaagaataatcagcattcctgagaaagaagagaaatctaaaagtttggaaaacttatccagggaaataatcaaggaaaacttcccccaccttgctagagacctagatatccaaatacaagaagctcaataaacacctgggaaattcattgcaaaaatatcattgcctaggtacattgtcatcagagtatccaaagttatctaaagacaaagagaatcttaagagctgtgaggtgaaactaccaggtaacctatgaaagaaaacctatcagattaacagcagatttctcagcagaaaccgtaaaagctagaagtgaatatggccctatcttcagccttcttaaacaaaacaattatcagccaagaattttatatccagtgaaactaagcttcacaaatgaagaaaatacacagtgtttttcagaaaaacaaatgctgagagaattcggcactaccaagccaacactacaagaactgataaaaggagctctaaatcttgaaataaaccctggaagcacatcaaaacagaacctctttaaagcataaatcccataggacatatacaacaaaaatacagataaaaagatacacaggcaacaaataccacgaagaatggaatagtacctcacacctcaatactgatgttgaatgtaaatggactaaatgctccacttaaaagatacagaattgcagaatgaataagaattcaccaaccagttatctgccgccttcaggagactcacctaacacataaggactcacataaacttaaggtaaaggggtggaaaatgacattccacacaaatggacaccaaaagcgagccaaagcagctattcttatgtcagacaaaacaaactttaaagaaacagcagttaaaaaagacaaagagggacatcatataatgataaaagcccttgtccaatgggagaatattacaattcttaatatatatgcatctaatactggagatcccaaatttataaaacaattactactagactagacagcaacataataatagtgggggacttcaatactccactgactgcactaggcaggtcatcaagacagtctacaaagaaacaatggatttaaagaacaaatggacttaacagatatttacaggacattctacccaacaactgcagaatacacattctattcatcagcacatggaactttctccaagataggccatatgatatgccacaaaacaagcctcaataaatttttaaaaattgaaattatatcaagcactctctcagaccacagtagaataaaattggaaatcaactacaaaaggaaccttcaaaaccatgcaaatacagggaaattaaataacctgctcctgaatgatcattgggtcaacaatgaaatcaagatggaaatttaaaaatcatttgctttgaaaaccggcacaagacaaggatgccctctcgccactcttactcaacatagtattggaagttctcgccaggacaatcaggcaagagaaagaaataaagcatattcaaataggaagagaggaagtcaaattgtctctgtttgcagatgacatgattgtatatttagaagaccctgtcatctcagcccaaaatcttaagctgataaacagcttcagcaaagtctcaagatacaaaatcagtgtgcagaaatcacaagcgttcctatacaccaataatagacaagcagagagccaaatcatgggtgaactcccattcacaattgctgcaaagagaataaaataaaatacctagaaatacaacttctaagggatgtgaagaacctcttcaaggagagctacaaaccactcactgctcaaggaaataagagaggacacaaacaaatggaaaaacattccatgctcatagatagaaagaatcaatatctttaaaatggccatactgcccaaagtaatttatagattcaatgctatccccatcaagctaccactgacttttttcaaagaattagaaaaaactactttaaatgtcatatggaatcaaaaaagagcccatatagccaagacaatcctaaacaaaaagaacaaagctggaggcatgatgctacctgacttcaaactatactacaaggctacagtaacaaaaacagcatggtactggtaccaaaacagatatatagaccagtggaacagaacagaagcctcagaaataatgccacacatctacgaccatctgatctttgacaaacatcacaaaagcaatggagaaagaattccctatttaataaatggtgctggaaaaactggctagcaatatgcataaaactgaaactgtaccccttccttacaccttatacaaaaattaactcaaggtggattaaagacttaaatgtgcaacctaaaaccataaaaatcctagaagataacctaggcaataccattcaggacataggcatgggcaaaaattcacgactaaaacatcaaaagcaatgacaacaaaggccaaaattgacatatgggatctaattaaactaaagagcttctgcacagcaaaagactatcatcagagtgaacaggcaacctacagaatgggagaaaatttttgcaatctatccatctgacaaagggctaacatccaaaatctacaaagaacttcaacaaatttacaagaaaaaacctaacgaccccatcaaaaagtggacaaaggatatgaacagatgcttctctaaagaagtcatttatgtggccaagaaacacatgaaaagaagctcatcatcactggtcattagagaaatgcaaatcaaaaccacaatgagataccatctcatgccagttagaatggcaattattaaaaagtcaggaaacaaaaggtgctggagaggatgtggaagaataggaaaaattttacactgttgatgggtgtgtaaattagttcaaccattgtggaagacagtgtggcgattcctcaaggatctagaaccagaaatactgtttgacccagcaatcccattactgggtatatacccaaagaattagaaatcattctactataaagacacgtgcacacgtatgtttattgtggcactattcacaatagcaaagacttggaaccaacccaaatggccatcagcgatataatggataaagaaaatgtggcacatatacaccatggaatactatgcagccataaaaatgatgagttcatgtctttgcagggacatggatgaaggtggaaaccatcattctgagcaaactaacacaggaacagagaaaccaaacaccacacgttctcactcataagtgggagttgaacaatgagaacacatggacacagggaggggaacatcacacaccagggcctgtcggggggtgagggggttaggagagggataacattaaaagaaatacctaatgtagatgacaggttgatgggtgcagcaaaccaccatggcacatctatacctatgtaacaaacctgcacattctgcacatgtatcccagaacttaaagtataataagaacaacaaaattacttgaactgaccgacaatagtgacacaacctatcaaaacctctaggatacagcaaagatggtgctaaaaggaaagttcacagccctaaatgtcgatgtcaaagagtctgaaagaggacagacagacaatataaggtcacaccacaagaaactagagaaacaaaaacaaacagaaccaaaacccagcaaaagaaagggaataactaagataagaggagaactaaatgaaattaaaacaactgcaaaaaaatacaaaagctaaatgaaataaaaagctggttctttgaaaagataaataaaactgatagaccattagcaagattaaccaagaaaagaggagagaagtgcaaataaactcaattagaaacaaaacaggagatactattactgataccacagaaatacaaaagattattcaaggctactatgaacacctttacatgcataaactagaaaacctaaaggagacgttcgaattcctggaaagatacagggctctagcttaagtcaggaagaattagataccctgaacagaccagtaataagcagcaagactgaaatgataataaaaatttaccaacaacaaaaaagtccaggaccagatagattcacagctgaattctaccagacattcaaagaagaattgataccaatcctattgacagtattctacaagatagagaaagagagaatcctccctaaatcattctatgaagccagtatcaccttaataccaaaactgggaaagaacataaccaaaaaaaaaaaacactacagatcaatatccctgatgaacatagatgccaacatccttgacaaaatactagctaatagcatccgacagcatatcaaaacccatgatcaagtgggtttcatgcgagggatgcacggatggtttaacatacgcaagtcaataagtgtgatacacaacataaagagaattggaaacaaaaatcatgtgattatctcaatagccacagaaactgcattcaacaaaattcaacatcactttatgactaaaactcagcaaaatcggtttacaaaggacatacctcaatgtaataaaagccagctatggtaaacacacagccaacattatattgaatgggaaaaagttaaaagcattctgtctgaaaactggaatgagacaaggatacccactctcaccacttctctttaacatattactggaagtcctagcaagagcaatcagacaagagaaacaagtaaagcacatccaaattgttaaagagaaagtcaaactgtcactgtttgctgatgatatgattgtgtatgtagaaaactctaaagactcctccaaaaccccctagaactgataaaataattcagcaaagtttctggatacaaaattaacgtacaccaatgagttgctttcttacataccagcaatgaccaagctgagaataaaatcaagaactcaaccccttttacaatagctgcaaaaaacaaaacaaaacaaaacaaaaacttaggaatatatacctaaccaaggaggtgaaagacatctacaaggaaaactacaaaacacggctgaaagtaatcatataagacacaaacaaatggaaacacatgccattctcatagatgggtagaatcaatattgtgaaaatggccataatgccagaagcaacctacaaattcattgcaattcccatcaaaataccaccattagtcttcacagaactagaaaaaacaatcctaaaattcttatggaaccaaaaaagagcccaataaacaagcaagtctaaaaaaaagaacaaatctgaaggcattacattacctcatttcaaactatacaataaggccatagtcaccaaaacagcatgatgctggtgtacaaataggcacatcgaccaatggaacagaatagagaacccagaaataaactcaaatacttacatccaactgatctttgacaaagcaaacaaaaacataaagtggggaaagggcaccctattcaacaaatggtgcggggatagctggcaagctacatgtaggagaatgaaactggatcttcatctctcaccttatacaaaaatcaactcaagatggatcaaggacttaaatctaagccctgaaactgtaacaattctagaaaataacatcggaaaaacccttctacacattggcttaggaaaggatttcatgaccaagaacacaaatgcaaatacataaaaacaaagaaaatatctgggactaaattaaactaaagagcttttgcatggcaaaaggaagagtctgcagaataaacagacaacccacagagtgggagaaaatcttcacaatctatacatctgacaaaagaataatatccaggctctaaaatgaacacaaatagattatcaagaaaataacaaacaatcccaataaaaagtaggctaaggacatgaacagacaattctcagaaaaagatatacaaatgaccaacaaacatatgaaaaaattctcaacatcactaatgatcagggaaatgcaaatcaaaactacaatgagatatctacttactctagttaaaacggctattaacaaaaaagacaaaaaataacagatccttgtgaggatatggagaaaagggaactctttcttacacactgttggtgggaatgtaaaatagtacaaccattatggaaaacagtatgaagatttctcagtaaactaaaaacagaactatcatacaatccagcaatctcactagtggttatttatccaaaagaaaggaaatcagtatatccaatggacacattacactcatgtttattgaagcactattcacaatagttaaggtttgggatcaacctaagtgtctatcaacagatgaacggattaaaaaattgtatttttgcacagtactattttgccatgaaaaagaatgaaatcttgtcatttgtagcaacatggatggaaccagaggtcattatgttaattgaaagccctgaagcagaacaaaaacaaactcttggtatgccaaagagatagataataaaataagccagatacagaaagtcaaatatcacatgtttttattcatctgtgggagctaaaaaagtgggtctcatggtggtagagagtagaatgatagttatcagaggctggaaaaagtgtgagtgtgtatgggaggggatttaagagatgttggttaataggtacaaacacagttggatagaaggattaagccataatgtttgatatttgagtagggtgactatagttaattactatttattatatatttcaaaatggctagaaatgaggatttgaaattttctcaatacatagaaatgataaatgctcaaagcaatggatatcctaaatatctagacttaatcatcacatgttctaggcatgtaagtatcacatgtaccccataaatat

SEQ ID NO: 515 - DNA, 25396 bp, Mus musculus
gtttttaaggctcattactggggtcttatgaaatttccataataccctgtaaatggaagcatttttttttcaataaatctatcttgaatatccagtgtgggttgggatctaatctctccttcatacagttggactgcttttatttatatggagttactagagttaacacaataggtaatatacccttgatttgtttttctttccataaccaccaggttatgcacaattccggaaataaaatgtgtgttccaagtgttctttacgctactctctggtacagttttagtgagattttgaaatgactacatataataagtggcctttaattacagaatggtttgtgtaggtacagaataaaatacaccaaatattatgagtttgagtcattgtcatgagtcataaaaatgcagctccaaacgaagtaaagagttagagtatggtgagaaattataaaccatcaagaacaaaatataggacccataaaggtagttgtgtggccaggtatttcgtgcatatttataatccttatttattattactaagaagccaagcagtatttataaaatatggtcctctctgaatgcaatatccaatggtctaaaacccatatcttagtgttctcagagcagtatcttttgtttgcaaatagaactgaattttttataactgtctcataatttatgtaagacttttgcctagccataaagataggatgagcaattctttttgcagtaggtagaacccttgcctgttttttcttgacttaatgaagatcagtaatagatcttggtttatagagagttagttggtagtagacatcatttcacagttgcattcctcgactgaatcctaattaaaatgtattagttttgttttctctgaggcagacagtgctggtggcttttcccatggtgcttccaggtactggtaccatagggtctagtcgaaagttgctctctggatctggaagaactgtcagaggcctggttgaatgttaccctctggatgaactgtagctggaggcatgtatgcaaagttcttccccactactttcctaagaaacaaatacactttgcatatgtgttttaaaagttatatgctaagtacacacccaatagttagctgtatctgtcagcagccagatcatgcaatgtgctgatgtgttgatacaaaaatattactgctgactgtctcatcgtgatagaaatatttgttgagttacttaactagagtaccaaaaatgaaaataaactagcattcaattatattcatctcaatactctattgataagtgtaccacatatcttgttaggtacacaaacaggaagggacttaacagtgtagtttagcttttttgtttacaagccctctcaatggacactgatcagagaatgaataatattaaatatcatggaaatggaaacaaatgcagaaagtttcatcagtccagacaaaataagggttaggacacaagaaagtgaaaaagagaggtatgtaaggtgacttgagaagaggaacatgcagttcaacatacacatacacatacacatacagttccacacagaggaaggggaagggagagagaaatgctgctaacccaggaaagtcaaagtaggggcttataatgggaaagattctaatgatttaaaaggagcatgactttattgttatccacttagcaagctaatctgttcatgcattattttgggcaaaagtctttaagccaacaatgagtttatcgtagtaacacagcacaaggtccataacattacttgttcttcttatcatcaggctgtttctactgttacctgtattcttcaaattctcctaatatttttaaaagaaagaaatatttagtaaagctctatgatcactaaattaatagacatccatgaatagctatccagaggggaagttttaaatgcccagacttggcaaattagatagaatctctttatggttttcctttgctgactcaataaggaaaaagataagggaacttgaattaagcatggatgaatgatatagtgttgctttggtctgaaatatgaggtataatttatcatttatatgaaaaggagtctcatgccaggcgttggtggcacactcctttaatcccagcactcgggaggcagaggcaggcagatttctgagtttgaggccagcctggtctacagagtgtgatccaggacagccagggctacacagagaaaccctgtctcaaacctcctgccccccccaagaaaaaaaaagaaagaaaaggagtctcatatcttgacagccatcaatcatcacagcgtatgcaatcgtcactttactcagcaatgtacacacaagggtatgggggacttttgggatagcattggaaatgtaattgaggaaaatatgtaataaaaaatattaaaaaaaaaaagaaatccacctccactaatccaggttaacatgccttttgataccattgttcatacagttatttttaaaatagcaattctatgaatgaagaataaaacatttcttcactgtcaaaaaaaaaaaaaaaaaaaaaaaaaaaaaaaaaaaaaaaccacagctttcagacagctttccttgactgttgaatctatggtgatatgtgataagaacctggaagtctatgtgattttctccttaggaacgatagtggcagtgttataagctagtttatagttctgtctaaaaccatattatacactttataagtttttatgtataatgtaaaaatatattttaatcaattataaactgataattacattttcaagatgaaagagttaattatttgatggaggtacatgtttaggctagttaacaattttgattgtcatttcacacagataaaaatattgaaaagaaatcatgatcagaactgagactttcaaaaacccaagaatcatctatctcatagtctcccttatatacaaggctaaattaggctgatatggccacttctttttataatcacagaagtacttaggtggtcttaaaacttttgtggctggagtttaatctgaggaataataccatcaaccatattgcagctctaacataaatactacagtagccagtgaagtagtacacaggaaaccatcacagaagccttcccagtaagcagaactgctcatttcgccaccattcttgtcatatatgaagttatgagggctttaagagattctaatttgtatagatttatttatatttatactgtgttcctattgtttttttatttacctggtaaacagaacataacaatgatctgtgccagtgtacattcatagtaactctgctgttatacactgacatgtataaataacaaactacactgaatatgttatgtttattttatagcttttgtttctttgtttttgagattataatttaattataatgtttcttcctcctctctatccccaaacaacctcaaataactctcacaactctccttcaaattctcttttcatcagtattattgcacacatatatggatgtgtatagatggtttgttgtgtcaggctgagtgcaaatgctctcttatatccatctattttttcctgtacatggagctgtgcataggtactgagacctcttcacttctggggaagtcccaatacatcacaggcttgtaggacagatacagaactactccagattcacttcaagaatcttaatcttacattcctgagcatactaaaatcttcataaaaatcaggcagcacaagtccctcccgcccctctcgagcaccgggatacctcgccagcggagtcgaccaacacccgcaagggcccacacaggattccccacgggatcctaagacctctggtgagtggaacacagcgtctgccacaatccaatcgagcggaacctgagactgcaggaaatagggaagcagactacccgggcctgacccgggccacaagtcccttccactccactcgagcactggagtgccttgccatcggaatcgcctgacacccgcaagagcccacacaggattcccaacgggatcctaagacctctagtgagtggaacacaatttctgccaggaggcaggttcgaacaacagatatctgggtaccttccctgcaagaagagagcttgcctgcagagaatactctgcccactgaaattaaggagagagctagcctcccaggtctgcttatagaggctaacagagtcacctgaagaacaagctcttaccagagacaactataacagctagcttcagagattaccagatggtgaaaggcaaacgtaagaatcctactaacagaaatcaagaccactcaccatcatcagaacgcagcactcccaccccacctagtcctgggcaccccaacacaaccgaaaatctagacccagatttaaaaacatttctcatgatgatgatagaggacatcaagaaggactttctcaaatcacttaaagaattacaggagagcactgctaaagagttacaggcccttaaagaaaagcaggaaaacacaaccaaacaggtagaagtccttaaagaaaaacaggaaaacacatccaaacagatgatggaaatgaacaaaaccatactagaactaaaaagggaagtagatacaataaagaaaacccaaagcaaggcaacgctgaagatagaaaccctaggaaagagatctggaaccatagatgcgagcatcagcaacagaatacaagaaatggaagagagaatctcaggtgcagaagattccatagagaacatcaacacaacagtcaaagaaaatacaaaatgcaaaaggatcctaactcaaaatatccaggaaatccaggacacaatgagaagaccaaacctacggataataagagttgatgagaatgaagattttcaacttaaagggccagctaatatcttcaacaaaataatagaagaaaacttcccaaacataaagaaagagatgcccatgatcatacaagaagcctacaaaactccaaataaactggaccagaaaagaaattcctcccaacacataataatcagaacaacaaatgcactaaataaagagagaatattaaaaggagtaagggagaaaggtcaaataacatataaaggaaggcctatcagaattacaccagacttttcacagagactatgaaagccagaagagcctggacagatgttatacagacactaagagaacacaaatgccagcccaggctactatacccggccaaattctcaattaccatagatggagaaaccaacgtattccacaacaaaaccaaattcacacattatctctccacgaatccagcccttcaaaggataataacagaaaagaagcaatacaaggacagaaatcacgccctagaacaagcaagaaagtaatccctcaacaaaccaaaaagaagacagccacaagaacagaatgccaactctaacaacaaaaataataggaagaaacaattacttttccttaatatctcttaatatcaatggactcaatttcccaataaaaagacatagactaacagactggctacacaaacaggacccaacattctgctgcttacaggaaacccatctcagggaaaaagacagacactacctcagagtgaaaggctggaaaacaattttccaagcaaatggtctgaagaaacaaggtggagtagccattctaatatcggataaaatcgacttccaacccaaagttatcaaaaaagacaaggagggacacttcatactcatcaaaggtaaaaacctccaagaggaactctcaattctgaatatctacgctccaaatgcaagggcagccacattcattaaagatactttagtaaagctcaaagcacacattgcacctcacacaatagtagtgggagacttcaacacaccactttcatcaatggacagatcgtggaaacagaaactaaacagggacacagtgaaactaacagaagttatgaaacaaatggacgtgacagatatctacagaacattttatcctaaaacaaaaggatataccttcttctgagcacctcacgggaccttctccaaaattgaccatataataggtctcaaaacaggcctcaacagatacaaaagtattgaaattgtcccatgcatcctatcagaccaccacagcctaagactgatcttcaacaataacataaataatggaaagtcaacattcacgtggaaactgaacaacactcttctcaatgataccttggtcaaggaaggaataaagaaagaaattaaagactttttagagtttaatgaaaatgaagctacaacgtaccaaaacctatgggacacaatgaaagcatttctaagagggaaactcatagctctgagtgcctccaagaagaaacgggagagagcacatactagcagcttgacaacacatctaaaagctctagaaaaaaaggaagcaaattcacgcaagaggagtagatggcaggaaataatcaaactcaggggtgaaatcaaccaagtggaaacaagaagaactattcaaagaattaaccaaatgaggagttggttctttgagaaaatcaacaagatagataaacccttagctagactcactagagggcacagcgacaaaatcctaattaacaaaatcagaaatgaaaagggagacataacaacagatcctgaagaaatccaaaacaccatcagatccttctacaaaaggttatactcaacaaaactggaaaacctggacgaaacggagaaatttctggacagataccaggtaccaaagttgaatcaggatcaatttgaccatctaaacagtcccatatcccctaaagaaatataagcagttattaatagtctcccagccaaaaaaagcccaggaccagatgggtttagtgcagagttctatcagaccttcaaagaagatctaattccagttctgcacaaactatttcacaaaatagaagtagaaggtactctacccaactcattttatgaagccacaattactctgatacctaaactacagaaagatccaacaaagatagagaacttcagaccaatttcccttataaatatcgatgcaaaaatcctcaataaaattctcgccaaccgaatccaagaacacattaaagcaatcatccatcctgaccaagtaggttttattccagggatgcagggatggtttaatatacaaaaatccatcaatgtaatccattatataagcaaactcaaagacaaaaaccacatgatcatctcattagatgcagaaaaagcatttgacaagatccaacacccattcatgataaaagtcttggaaagatcaggaattcaaggcccatgcctaaacatgataaaagcaatctacagcaaaccagtagccaacatcaaagtaaatggagagaagctggaagcaatcccactaaaatcagggactagacaaggctgcccactttctccctaccttttcaacatagtacttgaagtattagccagagcaattcgacaacaaaaggagatcaagggaatacaaattggaaaagaggaagtcaaaatatcactttttgcagatgatatgatagtatatatataagtgaccctaaaaattccaccagagagctcataaacctgataaacagcttcggtgaagtagctgaatataaaataaactaaaactagtcaatggcctttctctacacaaagaataaacaggctgagaaagaaattagggaaacaacacccttttcaatagtcacaaataatataaaatatctcagcatgactctaactaaggaagtgaaagatctgtatgataaaaacttcaagtctctgaagaaagaaattaaagaagatctcagaagatggaaagatctcccatgctcatggattggcaggatcaacattgtaaaaatggctatcttgcaaaaagcaatctacagattcaattcaatccctatcaaaattccaactcaattcttcaacgaattagaaggaacaatttgcaaattcatctggaataacaaaaaacctaggatagcaaaaactcttctcaaggataaaagaacctctggtggaatcaccatgcctgacctaaagctttactacagagcaattgtgataaaaactgcatggtactggtatagagacagacaagtagaccaatggaatagaattgaagacccagaagtgaacccacacatctatggtcacttgatctttgacaagggagctaaaaccatccagtggaagaaagacagcattttcaacaattggtgctggcacaactggttgttatcatgtagaaggatgcgaatcgatccatacttatctccttgtactaaagtcaaatctaaatggatcaaggaacttcacataaaaccagagacactgaaacttatagaggagaaagtggggaaaagccttgaagatatgggcacagggaaaaaatttctgaacagaacagcaatggcttgtgctgtaagattaagaattgacaaatgggacctaatgaaactccaaagtttctgcaaggcaaaagacaccgtcaataagacaaaaagaacaccaacagattgggaaaggatctttacctatcctaaatcagataggggactaatatccaacatatataaagaactcaagaaggtggacttcagaaaatcaaataaccccatttaaaaatggggctcagaactgaacaaagaattctcacctgagggatatcgaatggcagagaagcacctgaaaaaatgttcaacatccttaatcatcagggaaatgcaaatcaaaacaaccctgagattctacctcacaccaaccagactggctaagatcaaaaattcaggtgacagcagatgctgaagtggatgtggagaaagaggaacactcctccattgttggtgggattgcaagcttgtacaaccactctggaaatcagtctggcggttcctctgaaaattggacatagtactaccagaggatcccgcaatacctgtcctggccatatatccagaagatgccccaactggtaagaaggacacatgctccactatgttcatagcagccttatttataatagccagaagctggaaagaacccagatccccctcaacagaggaatggatacagaaaatgtggtacatctacacaatggagtactactcagctattaaaaagaatgaatttatgaaattcttagccaaatggatggacctggagggcatcatcctgagtgaggtaacacattcacaaaggaactcacacaatatgtactcactgataactggatattagtccaaaacctaggatacccaagatataagatacaatttcctaaacacatgaaactcaagaaaaatgaagactgaagtgtggacactatgcccctccttagaagtgagaacaaaacacccatggaaggagatacagagacaaagtctggagctgagacgaaaggatggaccatctagtgattgccatatccagggatccaccccataatcagcatccaaacgctgacaccattgcatacactagcaagattttatcgaaaggacccagatgtagctgtctcttgtgagattatgccggggcctagcaaaaacaggagtgaatgatcacagtcagcaggtggatggatcacagggctcccaatggaggagctagagaaagtacccaaggagctaaagggatctgcaaccccccaggtggaacaacattatgaactaaccagtaccctggagttcttgactctagctgcatatgtatcaaaagatggcctagtcggccatcactgtaaagagaggcccattggacacgcaaactttatatgccccagtacaggggaacgccagggccaaaaagggggagtgggtgggtaggggagtgggggtgggtcggtatgggggacttttggtatagcattggaaatgtaaatgagctaaatacctaataaaaaatgaaaaagaaaaattagtcaggatgtaagaaccagaggtattcagcctagagacccatgattgaacaagacaggcaaaaactttttttaaaaagtcaatgaaatgatgcctgatgatattctcatgtactcattgattgattggtgcccagttcagttatcgttggagatcatcatccagcaacggataggagcagacacagagacccacagccaaacactaggcagagcagctggatcccaaggaagaggacgaggaagaattgtaggagtcaggtattaaggactctgtgagaacagactgactaaacaagtaagcaggattcataggggctcacagagagggagagagggagggagggagggagggagggagggagggagggagggagggagtgagggaaggagggagaaagagaaagagaaagagagagggagatgagagagagaaaggagagtgagagaaaggagagagagaggagagagagagaaaggagagagagagagaaaggagagagagagagaaaggagagagagagaaaggagagagagagagagagagagagagagagagagagagagagcgagagagagagagagagagagagagagagagagagagagagagagagagagagagagagagcgagctgaggtaattcactactcagtagtgcatgttgcttcttcccttcacaggggaagttcccttcttattttcacatatctctttcatgccctgagtcattctcatccctaagtgcctccctcatcatctcacacagaagcttctcttcccaggtccttctcctcccacttttgtaccttctccttgtgtgaacctcagagcttatttaaggcttcccatggtttttaataccaagaaggaaaagcacaccagaagttcttagcatgaaaagtttaggacattttatgtgagagtttagaggacaaaacaagattgaaaaggaatgaagataaaattaaataatttaagagtaatgaaaaatatagagtacaaatgggaataggtggggactatgaagtaaaaaaatgattctaaaacatatgcagtatacacagtgcccaggaagcagcagaatgagcgactgaattagtgagagaaggagagagagagagagagagagagagagagagagagagagagagagagagagagagagagagagagagagagaggaagaaaactcttcaacacttaacacagggagaatatctttcaagatcccttcactgggtttacctgtcactaggaaaacctttctcacttctttccctccctctttctttatctctgaatattgccactaatcttagggttataagtagctttgtatttcttttttattttttccaaattgagagttctgtgtttccttctctggctcccaaaaactaaaagagagagcaatgtccaagacgtgatcaattcacttgtgtgctacttcccataaatcatgtgactaaattaacaaattaaagaatgaaggaaacaaaccaaacaagtatgaaagaaatgaatatatatttattttcctacctgaaggtttcttcaaaacatgaagaaaaatagttagaaaaacaatagaaaaatgattattttgtcttcttttcttatgttccataattggggtgatcctcttgtgcactcaaactaaaagaaaacgaaccaacatacccagatcaaaacaaaacagaacaggcaaattttcttatgtataatgtgttttaattttttatttgtgtagtaaacaatattgaagagataatattgaacagacaagctatgttattggtgcaagaattgaaaaatacagtatttaaagaagatgttatagaaacagaattagctgcaaggataagaacagacactactcagagtgagacccagaactcaaatgtcttaagcctgggccatagccaccctgtgtagatatggttgtcatctctgaagcctcaccctgcagggtaacaccctggcattggccaatctgctcagagaggacagagtgggcaggagccagcattgggtatataaagctgagcagggtcagttgcttcttacgtttgcttctgattctgttgtgttgacttgcaacctcagaaacagacatcatggtgcacctgactgatgctgagaaggctgctgtctctggcctgtggggaaaggtgaacgccgatgaagttggtggtgaggccctgggcaggttggtatccaggttacaaggcagctcacaagtagaagttgggtgcttggagacagaggtctgctttccagcaggcactaactttgagtgtcccctgtctatgtttccctttttaggctgctggttgtctacccttggacccagcggtactttgatagctttggagacctatcctctgcctctgctatcatgggtaatgccaaagtgaaggcccatggcaagaaagtgataactgcctttaacgatggcctgaatcacttggacagcctcaagggcacctttgccagcctcagtgagctccactgtgacaagctgcatgtggatcctgagaacttcagggtgagtctgatgggcacctcctgggtttccttcccctggctattctgctcaaccttcctatcagaaggaaaggggaagcgattctagggagcagtctccatgactgtgtgtggagtgttgacaagagtttggatattttattctctactcagaatcgctgctccccctcactctgttctgtgttgtcatttcctctttctttggtaagcttttaatttccagttgcattttactaaattaattaagctggttatttacttcccatcctgatatcagcttcccctcctcctttcctcccagtccttctctctctcctctctctttctctaatcctttcctttccctcagttcatttcttcttctttgatctacttttgtttgtctttttaaatattgccttgtaacttactcagaggacaaggaagatatgtccctgtttcttctcatagctctcaagaatagtagcataattggcttttatgccagggtgacaggggaagaatatattttacatataaattctgtttgacataggattcttataataatttgtcagcagtttaaggttgcaaacaaatgtctttataaataagcctgcagtatctggtatttttgctctacagttatgttgatggttcttccatcttcccacagctcctgggcaatatgatcgtgattgtgctgggccaccacctgggcaaggatttcacccccgctgcacaggctgccttccagaaggtggtggctggagtggctgctgccctggctcacaagtaccactaagccccttttctgctattgtctatgcacaaaggttatatgtcccctagagaaaaactgtcaattgtggggaaatgatgaagacctttgggcatctagcttttatctaataaatgatatttactgtcatctcaattctgtgttttgattacttttgtttcttgcaaggattaatgtgaaatatttattatataaagcagttggggcatgctggagggaaggaagtgagggtaaaagtcatgccattctatttcagttaaaaccattcaagaataaaataccaaagaggaagtgagagttcagaaacaaggtattcactttgacttcctggtaattgacttctgcagctttgtgataagtggtgagatagtaagtggctattccgtcagcaaccttccctgacatccatttctcagaaaaagaagttaaataggggtttaatttacagcatagacatatactatgttttatagttttttgtattgttctaatttttcctcacaaatgccccttgattttctgcttgttgtctagtatctcagagactttagtctaatttctcttgcctcaagtatccatcactcttttcttttatctatctatctatctatgtatctatctatgtatctatctatgtatctatctatctatctatctatctatctatctatctatctatctatctaaaatatatatcaaatatattttttcttttttattattttctttatttacatttcaaattttatcccctttcctagtttcccctccaaaaatcccctctcccctctcccctccccctgctccccaacccacccactcccattcctggtcctggcattcccctatattggggcgtagagccttcacaggaccaagggccttgattactattcaagggtgtcttccttgcttgcttttctatgaacattatccattttctcctgacctctgttatcttagaaaaccccactgtgttacagagatatgcttgaagaggaaacccaggagctcttgagccctggtacccagcctctcccattaacaatgataatgaaacttcacatactcacaacttgaactagagaacaggaggcaataataaggggtaaataaggactatggaaaatatgagcagaaatgttttgttctttgatagcctttgcagacataggaagttttcatgggctcatagcaaagagaagtccatttcccctagtgtgtctgtcttgaatatccactaaggacatggagattggactctctttggactggtctctgttgtttcccctcctggttttataattgtttgtattattcttggcaacacttcatgttcacagtttcccactctttaagcacttgtctcatgctaaattctggagacaaaatatgagtttcaagtgttccttatcctgaactacaaggtaatgttgttggagtaatacatatgatacatatgaatagttagagaccaattatgagattacaggataagccatcaaaatgaaatcaaattaaactgtcgcctttaactaaaaaacgaaccaaagccttaagatataaaagtgcaaaatatctagaatgaaaagaagagcaaaatttattaatattggctgtgaaccaggtttgtagtgcatgcctgtgttgccagcccttgagaacctgaggcacaaccataaagtctgcctaggatacacggtgaaaggtttgttttaatagacaacagccacattcaacattttaaaggaaaagctcagataagaaggacaaaaatggacaagtcaaatgtgactaataaagtttttgcatagcatggagaataatcaacaaaatgatagttaatttaaaatgggagaaagtatttgtgaactaatatccaacagtggatcactatgcaaagtgtgtaaggaacccatgcaacccactagaaagaacatggaacacaaaaaggaagaaaacagatatattttttttcaaaagaagtcacacaaatttctaacacatttatgaaaaagaactcaatattagggcaatgcaaatcaaaacatatcaagagatatcactgttttcttttggaacagttgtcatcaaggaggcaaaagacatgtgttagagcagatgtaactgtgtatatgaatgtttcgtatatagatagactagcagctagtagtgctaatgttgacatcctcccaaggtagttttgtagatgaggcattcttctgtcttttctcatagtgcatgcaataattatgcatgggtatggtgagacattttagggtgtgtgtgtgtgtgtgtgtgtgtgtgtgtgtgtgtgtgtgtgtgtgtgtgagagagagagagagagagagagagagagagagtgtgtttttactggaagtcacccacattcatacagtccatcacaatctattcaactgcaaaaaactgaaagtgacctggtaaagtattatgtctttatgtctttactaagtgcctttagtagaaagcccccagttaagaagtgactctaaatgcaaaccagcaatcaaactctgcaagctcttttacaaatggcagaacatcactctaatatcagttaaataaggacaggaaccagctgaacaccgggttaaaaaaatgcaatgacttgatctgccaggatggggggaatatcaagggtagctgccactctctcagaaaagaaggggagaggcaatgcagggaagggctgtgtgaggggaggactgggaagggggtataattgggatataaagtgaataaataaattaattaatggaaataaatccattcctactaagaaagccacactgcagttataaaatgtgagcctcctgtgaaagccacactcagcttttctggaggcaatgtcttcttgtttcatgtggaattgaagattttcacaaccttccactaattgacacaagtggaatttctaacctgacaaggagattaaataagcaaccttcacacagcagctgagctatctggccaaattgtcagggttcagaagagcacaaagagacacagactgataagaagcagttcaagtcatttaagagcggtgcctatagactccactattgtaaaatatattatctctggttttgtcaaatggttattgtcagtgcttgggccgatttaatcagaaacgccccacaccagttttggaaactgaacttttattcagcacacagaaatagacattctgttcccttgcttcgtgtattgttaggaaacactcacactgagaggaaaacaataacaacaacaacacaaaacaactggacccttatgatgaattttactgcaccaagaatataactggaaacaagtttttttttctctcttccttcctcccttcctcccctccctctaattatctcataggtatatatatttcaaagcccaagaatgaaggcaagatttttttttttcaattgaagtagtaacttcacaccaaacagctactctcttatcagcaaaggcagtcctcaatgtggtgatgtgttgatatgaaaacactattcattacaacttcctcttgacataatttgttgattcagtgctctgaagtacgagaaagaataaaggggaaaaatctaaaacagaaataccagccacacagaataagggttggggaactgaaatgttgataactcaggggatcaaaagactgggtcacaaatagaaatgaaaagtaagacacataatttcatgatccaagggcacacgttttgggtaaattttatgtaaaacattttaaattaaggagaagcgtattatgggggaaatctgtatttggcattgaattttaattttctctcatattaactaatgtttttattatacaaattttcaaattttcccttttcttttttgtctatttgtaaatgtcacaagaatttctaaatgtaataccaagaaaagaaaatgtgcattaaacattgctgataacctaactaataagcgttaatgaagatctatttagcctaaaatgttagggtcctgatttggcaaaacccatagtatccagctgattattcattcccatgttgacatcatttaggagagtaaagtaaagatgaagaaagagcagattaatcatagaaatacaaaatttctcttttatatgaaatctaagtaaaattcattctttatatggaaatgagtcttgcatttgggcgggcagtcatacactgcaccagaggcatagctattcatagtaatacataatgtaagcaattaaatatatgcagtggcatttaaacaaattagagcttctttggcaaatggatggatctggaggatatcattgtgagtgaggtaacccaatcacaaaagaacacacatgatatgcacccactgataagtagatattagcccagaagctcagaatacccaagatacaattcacaaaacatatgaaactcaagaagaaggaagaccaaaatgtggatacttcattccttcttagaaggggggacaaaatacccgtggaaggagttatagagacagtgtggagcagagactgaaggaatgaccatccagagactgccccaccttgtgatctatcccataaacaaccaccaaacccagacagtattgtggatgccaacaagagattgctgacaggagcctgatatagttgtctcctgagaggctctgccagtgcttgacaaatacagacgtggatgctcacagccatccattagactaagcacagggtccctaatgaaggagctagagaaagtacccaaggagctgaaggagtttgcagccccataggaggaacaacaatatgaactaacaagtttcccctgagtacccaaggactaaaccaccagtcaaataaaacacacagaaggactcatagctccagctgcatatgtagcagaggatggcctagttggtcatcaatggaaagagaggcccttggtcctgtgaaggttctaaaccccactataggggaatgccatggccaggaagtgggagtgggtgggttggtgagcagggggagggagagggtatagggggttttcaggggagaccaggaaaggggataagattttaaatgcaaataaggaaaatatctaataaaaatgaaaatatccaataaataaattagagcaagaactgaccttcaattatttttaccttgtaaatttgtttaataagcttatcaatattctaggcatctttaatattttctgatgttttgcgtgacattaaaataaatataaccactaatttcttataattaaatgagaaagaacattcacacgtggatgtcatgggactggtattgaacctttcacagttaatctagccaggtgagttaatagagagcacaccgattttctatttcaagaaaaatgtctttctgggctttggatgttgttactggctgggtttgtcagagtgaaaagtggatattaactatgatagcagaataaaggggtgaaggatgccttgccaagatgaaaataacagaaagagtatacaggatcttaaaacaagccaggatgtgagctgtacaagttttgagagctctgaggcatgttctcagtcaacctcaagggggcagtattgagcttggaattcagtatcaactcttggagaggtaatttttaatggatgggaacattacagaaagttcttgatcttatcttttttataatagaccaatcacagatgaagggcatgcctatgtaccaaatggctcatcttctctgcctgacgtacagctggcagagtttcccagagtttgtgggctgcctcttcactttatttgcagtctccattgctgaagagaagtgaaatttcattggtactcacttgtcaattattggtctggagaacccagagtcttatttagaatgtctgtctcttgaagtgtatcttctttcctttagagatttcagggcttccgggtttacactaagctgtctgataaatttgaagttgattattttttttttttttctgtatgaaagaaagggtcaggttttgttcttccatacatagaaatccagtttcctgaaaccatttgctaaaaatctgtcttttctccagggagagattttggcatttttctccattaaaaacataaggtggttagttcatattgttgttccacctatagggttgcagacccctttagctccttgggtgctttctctagtttctccattgggggccctgtgttccatccgatagctgactgtgagcatccacttctgtgttttccaggccccggcatagcctcacaagacacatatatatgagggtcctttcagcaaaatcttgctactgtatgcaatggtgttagcatttggaggctgattatgggatggatccctgggtacctccggagctcatgtctctacctgcatatatatcagaagatggcctagtcagccatcattggaaagagaggcctcttggtcttgcaaacttttttttaaaatatttttttattacgtattttcctcaattacatttccaatgctatcccaaaagtcccccataccctcccccccacttccctacccacccattcccactttttggtcctggcgttcccctgtactggggcatataaagtttgcctgtccaatgggcctctctttccagtgatggccgactaggccgtcttttgatacatatgcagctagaatcaagagctctggggtactggttagttcataatgttgttccacctatagggttgcagatccctttagctccttgggtattttctctagctcctccattgggggccctgtgatccatccaatagctgactgtgagcttccacttatgtgtttgctaggccactgcatagtctcactagagactgctatatcagggtcctatcagcacaatcttgctaatgtatgcaatggtgtcagcgtttggaggctgattatgggatggatccctggatatggcagtctctagatggtccatccttttgtctcagctccaaactttgtctctgtaactccttccatgggtgttctgttcccaattctatgaaggggcaaagtgtccacactttagtcttcgttcttcttgagtttcatgtgttttgcaaattggaacttatatcttgggtatcctaagtttctgggctaatatccacttatcagtgagtacatatcatttgagttcctttgtgattgtgttacctcactcaggataatgccctccaggtccaaccatttgcctaggaatttcagaaattcattctttttaatagctgagtagtactccattgtgtaaatgtaccacattttttgtatccattcctctgttgaggggcatctgggttctttccagcttctggctattataaaaaaggctgctatgaacatagtggagcatgtgtccttcttactggttggaacatcttctggatatatgcccaggagaggtattgcgggatcctccggtagtaccatgtccaattttttgagaaaccgccagactgatttccagagtggttgtacaagcttgcaatcccaccaacagtggaggagtgttcctctttctccatatcctcaccagcatctgctgtcacctgaatttttgatcttagccattctgactggtgtgagatggaatctcagggttgttttgatttgcatttccctgatgatgaataccgaatggctgagaaacacctgaaaaaatggtcttgcaaactttatatgccttagtacaggggaacaccagggccaagaagtgggagtgggtaggtaggggagtggggaggggtgtgtatgggggacttttgggatagaatttgaaatgtaaatgaagaaaatacctaattaaaaacaaacaaacaaacaaacaaacaaacaacaaaacatcaggtgggtatcgacacatgtgtttatttttgggtcgtctatgctagctagttgatttgcacgtgtgttgatgtcagtcctcttgtttctgttattactggtttgtcccatcaaaaactgacactggcactcaacagagcattttctttttttaaaatttttatttttaatttatttttttaactccatattccattccctgccccccatccaccctccaattgttccacatcccacacttccaccccaacccatcccaccccatgtccatgtggatgtccccacccctcaacccacttgacctctaaattttctggggcctccagtctcttgagagttaggtgcatcatctctgaacgaacacagacccagcagtcctctactctatgtgtgttggggacctcatatcagttgatgtatgctgtctgtttggtggttcggtgtttgagagatcttggaggtccagattaattgagactgctggtcctcctacaggattgccttgctccttggcttctttcagccttccctaattcaacaacagggatcagatgcttctgtccattggttaggtgcaaatatctgcatctgattcttacagctgcttgttgggtctttcggggcattcttgatagatcccttttgtgagctctccatatcctcagtaatagtgtcaggccttggaatctcccctggagctggatcctaccttgggcttgttgttgggccttcttttcctcatgctcctctccatttccatcccagtaattctttcagacagaaacaattatgggtcagaggtgtgactgtgggatggcaaccccatccctcacttgatgccctgccttcctgctggaggtgggctctgtaatttccctctccatactgtcctctagctgttcatctaaggtccctccctttgagttctgagagtctctcacttcccagggctctgatgcactctgggggggggatcccccaacatcttatttcttgagattacctgattacattatttctgttggccctaggggatttagtccttttccctcacccaataccagaccaggttcccctctacctccaactccccctccatccactatccctcccgtgtccttccctcctaccatacttgtgattgctttcttctctctcccaagtgggactgaggtgtcctcacttgggcacttcagcttgttgaggtttttgagttctatggactgtatcttggatattttgttctttttatttttattatttttattttttgctaatatctacttattagtacataccatgcatgtccttttgggtctgagttacctcacttgggatgatattttctagttccatccatttgtttgcaaaactcaggatttcctcattcttgatagctgagtattattccattgtgtaaatgaaccacattttctgtatctgttcttctgttgtgggacatctaggtaatttccaacttctggctatcacaaataacgccattatgaacatagtggaacatgtgctcctgtggcatggtggggcatctcttgggtgcattcccaagagtggtacagctgggtcttcaggtagatctatttccaattttctgaggaacctccagattgatttccaggttgtttgtcccagtttgccatcccaccagcaatggaggtgtgttcctatttcttcacatcctctccaacatttgctatcacttgagggtttgatcttagccaatctgattggtgtaaactggaatctcagggtcattttgatatgcatttctctgatcatttgaacattttctcaaccattcccaattcttcagttgtgaattctcaatttagttctataccccatttttattagatattttcttcatttacatttcaaatgctatcccattttctagtttcctttccaaaagtcccctataacccccctacctcccgccctgctccccaacccacccactccattttttgattgagatgtttggtttttcggtgattaacttcttgagttggattcggggttagtgaatattttttttccaatctaagttgccaatttgtcttattgactatgtcctttgccttacagaagctttccagtttcatgaggtcccatttatcaattgttgatcttagagcatgagccactgtagttctgtttaagcaatttccccctgtacctatttgttcaaggctctttcccactttctctcctattagattcagtgtacctggttttatgttgaggtccttgatccacttgaacttgagctttgtacaaggtgacaaatatgggtctattttcattcttctacatatagacagccagctagaccagcaccatttattgaagatgctttcttttttccattgtatatttttggtgtctttctcaaagatcaagtaaccttaagtgtgtggttttatttctgggtcttcagttcttttccattgatcaacatgtctgtctctgtgccaataccatgcagtttttatcactattgctctgtaataaagcttgaagtcagggatggtgattcccccagctgctctcttattgttaaaatttgtttccactattatgggtatttgcctttccagatgaatttaagaattgttctttccatgtctttgaagaattgtgttgggattttgattgggattgcattggatctatagattacctttggtaggatggccatttttactatgttaattttgccaatccataaccatgacaagtttatacattttctaagatcttcttcgatttctttcttgagagacttggaattattttcatacaggtcttccacttgtttggttagagttactccaagatattttattctatttgtggctattgtgaatggaatttttaccctaacttctttctcagcctgtttatcctttgtataaaggaaggctactgatttatttgagttaattttatatccattcactttgctgaagttgtttatcagctggagaagttctctggtagaatttatgtataccatcatatcatctgcaaatagtgataccttcacttcttctttaccaatttgtatccctttgatcactttttttctgtcttattgttctaactaacacttcaagtactatattgaatagatatggggagagtgggcatccttgtcttgtccctgattccagtgggattgtttcaagtatgtgtcagtttaatttgatattggttgttggtttacagtaaattgcttttattatgtttaggtatgggccctgaattcctgatctctccaatactttttaacatgaagaggtattgtattttgtcaaatgttttttctggatcttaagagatgatcatgtgatatttttctttaagtttgtttatagagtggattgcaataatgaattttcatatattaaaccaaccttgcatcactgggatgaagcctacttgatcatggtgaattatggttttgatgtgttcttgaattcggtttgctaggattttattgagtatttttgcattgatattcataagtgagattggtctgaagttctcttttttggttgggccctgtgtgatttaagtatcagagtaattgtggcttcatagaacaagttaggttgtgctaattctgtttctattttatggaatagtttgaggaaaacttgtatcaggtcttctttgaaggtctggtagaattctgtactaaatccatttggccctgggcttttttttggttgggagatttttaatgacttcttctatttccttgtgtgatatgggcctatttagataatttacctgttcttgatttaactttgacatgtgtcatctgtctagaaaaccattcatttcatttaggttttccagttttgttgagtatagactattatagtaggatctgatcctccatttctgttgttatgtatcccttttcatttctgattttatgaatttggatactgcctcttggccctttagttagtttggctagtggtttacctatcttgttgattctttcaaaggatcagcctttggttttgctgatttttgtattgttttctttgtttatatttggttgattttggccctgagtttgactatttcccaccttctactcctctgagtacctttgtttctttttgttctagagctatcagatgtggtgttaagttgttagtgtaagatctcttcagtttctttacccaggcacttagtgttgtgtactttcttctt

SEQ ID NO: 516 - DNA, 25396 bp, Mus musculus
aagaagaaagtacacaacactaagtgcctgggtaaagaaactgaagagatcttacactaacaacttaacaccacatctgatagctctagaacaaaaagaaacaaaggtactcagaggagtagaaggtgggaaatagtcaaactcagggccaaaatcaaccaaatataaacaaagaaaacaatacaaaaatcagcaaaaccaaaggctgatcctttgaaagaatcaacaagataggtaaaccactagccaaactaactaaagggccaagaggcagtatccaaattcataaaatcagaaatgaaaagggatacataacaacagaaatggaggatcagatcctactataatagtctatactcaacaaaactggaaaacctaaatgaaatgaatggttttctagacagatgacacatgtcaaagttaaatcaagaacaggtaaattatctaaataggcccatatcacacaaggaaatagaagaagtcattaaaaatctcccaaccaaaaaaaagcccagggccaaatggatttagtacagaattctaccagaccttcaaagaagacctgatacaagttttcctcaaactattccataaaatagaaacagaattagcacaacctaacttgttctatgaagccacaattactctgatacttaaatcacacagggcccaaccaaaaaagagaacttcagaccaatctcacttatgaatatcaatgcaaaaatactcaataaaatcctagcaaaccgaattcaagaacacatcaaaaccataattcaccatgatcaagtaggcttcatcccagtgatgcaaggttggtttaatatatgaaaattcattattgcaatccactctataaacaaacttaaagaaaaatatcacatgatcatctcttaagatccagaaaaaacatttgacaaaatacaatacctcttcatgttaaaaagtattggagagatcaggaattcagggcccatacctaaacataataaaagcaatttactgtaaaccaacaaccaatatcaaattaaactgacacatacttgaaacaatcccactggaatcagggacaagacaaggatgcccactctccccatatctattcaatatagtacttgaagtgttagttagaacaataagacagaaaaaaagtgatcaaagggatacaaattggtaaagaagaagtgaaggtatcactatttgcagatgatatgatggtatacataaattctaccagagaacttctccagctgataaacaacttcagcaaagtgaatggatataaaattaactcaaataaatcagtagccttcctttatacaaaggataaacaggctgagaaagaagttagggtaaaaattccattcacaatagccacaaatagaataaaatatcttggagtaactctaaccaaacaagtggaagacctgtatgaaaataattccaagtctctcaagaaagaaatcgaagaagatcttagaaaatgtataaacttgtcatggttatggattggcaaaattaacatagtaaaaatggccatcctaccaaaggtaatctatagatccaatgcaatcccaatcaaaatcccaacacaattcttcaaagacatggaaagaacaattcttaaattcatctggaaaggcaaatacccataatagtggaaacaaattttaacaataagagagcagctgggggaatcaccatccctgacttcaagctttattacagagcaatagtgataaaaactgcatggtattggcacagagacagacatgttgatcaatggaaaagaactgaagacccagaaataaaaccacacacttaaggttacttgatctttgagaaagacaccaaaaatatacaatggaaaaaagaaagcatcttcaataaatggtgctggtctagctggctgtctatatgtagaagaatgaaaatagacccatatttgtcaccttgtacaaagctcaagttcaagtggatcaaggacctcaacataaaaccaggtacactgaatctaataggagagaaagtgggaaagagccttgaacaaataggtacagggggaaattgcttaaacagaactacagtggctcatgctctaagatcaacaattgataaatgggacctcatgaaactggaaagcttctgtaaggcaaaggacatagtcaataagacaaattggcaacttagattggaaaaaaaatattcactaaccccgaatccaactcaagaagttaatcaccgaaaaaccaaacatctcaatcaaaaaatggagtgggtgggttggggagcagggcgggaggtaggggggttataggggacttttggaaaggaaactagaaaatgggatagcatttgaaatgtaaatgaagaaaatatctaataaaaatggggtatagaactaaattgagaattcacaactgaagaattgggaatggttgagaaaatgttcaaatgatcagagaaatgcatatcaaaatgaccctgagattccagtttacaccaatcagattggctaagatcaaaccctcaagtgatagcaaatgttggagaggatgtgaagaaataggaacacacctccattgctggtgggatggcaaactgggacaaacaacctggaaatcaatctggaggttcctcagaaaattggaaatagatctacctgaagacccagctgtaccactcttgggaatgcacccaagagatgccccaccatgccacaggagcacatgttccactatgttcataatggcgttatttgtgatagccagaagttggaaattacctagatgtcccacaacagaagaacagatacagaaaatgtggttcatttacacaatggaataatactcagctatcaagaatgaggaaatcctgagttttgcaaacaaatggatggaactagaaaatatcatcccaagtgaggtaactcagacccaaaaggacatgcatggtatgtactaataagtagatattagcaaaaaataaaaataataaaaataaaaagaacaaaatatccaagatacagtccatagaactcaaaaacctcaacaagctgaagtgcccaagtgaggacacctcagtcccacttgggagagagaagaaagcaatcacaagtatggtaggagggaaggacacgggagggatagtggatggagggggagttggaggtagaggggaacctggtctggtattgggtgagggaaaaggactaaatcccctagggccaacagaaataatgtaatcaggtaatctcaagaaataagatgttgggggatcccccccccagagtgcatcagagccctgggaagtgagagactctcagaactcaaagggagggaccttagatgaacagctagaggacagtatggagagggaaattacagagcccacctccagcaggaaggcagggcatcaagtgagggatggggttgccatcccacagtcacacctctgacccataattgtttctgtctgaaagaattactgggatggaaatggagaggagcatgaggaaaagaaggcccaacaacaagcccaaggtaggatccagctccaggggagattccaaggcctgacactattactgaggatatggagagctcacaaaagggatctatcaagaatgccccgaaagacccaacaagcagctgtaagaatcagatgcagatatttgcacctaaccaatggacagaagcatctgatccctgttgttgaattagggaaggctgaaagaagccaaggagcaaggcaatcctgtaggaggaccagcagtctcaattaatctggacctccaagatctctcaaacaccgaaccaccaaacagacagcatacatcaactgatatgaggtccccaacacacatagagtagaggactgctgggtctgtgttcgttcagagatgatgcacctaactctcaagagactggaggccccagaaaatttagaggtcaagtgggttgaggggtggggacatccacatggacatggggtgggatgggttggggtggaagtgtgggatgtggaacaattggagggtggatggggggcagggaatggaatatggagttaaaaaaataaattaaaaataaaaattttaaaaaaagaaaatgctctgttgagtgccagtgtcagtttttgatgggacaaaccagtaataacagaaacaagaggactgacatcaacacacgtgcaaatcaactagctagcatagacgacccaaaaataaacacatgtgtcgatacccacctgatgttttgttgtttgtttgtttgtttgtttgtttgtttttaattaggtattttcttcatttacatttcaaattctatcccaaaagtcccccatacacacccctccccactcccctacctacccactcccacttcttggccctggtgttcccctgtactaaggcatataaagtttgcaagaccattttttcaggtgtttctcagccattcggtattcatcatcagggaaatgcaaatcaaaacaaccctgagattccatctcacaccagtcagaatggctaagatcaaaaattcaggtgacagcagatgctggtgaggatatggagaaagaggaacactcctccactgttggtgggattgcaagcttgtacaaccactctggaaatcagtctggcggtttctcaaaaaattggacatggtactaccggaggatcccgcaatacctctcctgggcatatatccagaagatgttccaaccagtaagaaggacacatgctccactatgttcatagcagccttttttataatagccagaagctggaaagaacccagatgcccctcaacagaggaatggatacaaaaaatgtggtacatttacacaatggagtactactcagctattaaaaagaatgaatttctgaaattcctaggcaaatggttggacctggagggcattatcctgagtgaggtaacacaatcacaaaggaactcaaatgatatgtactcactgataagtggatattagcccagaaacttaggatacccaagatataagttccaatttgcaaaacacatgaaactcaagaagaacgaagactaaagtgtggacactttgccccttcatagaattgggaacagaacacccatggaaggagttacagagacaaagtttggagctgagacaaaaggatggaccatctagagactgccatatccagggatccatcccataatcagcctccaaacgctgacaccattgcatacattagcaagattgtgctgataggaccctgatatagcagtctctagtgagactatgcagtggcctagcaaacacataagtggaagctcacagtcagctattggatggatcacagggcccccaatggaggagctagagaaaatacccaaggagctaaagggatctgcaaccctataggtggaacaacattatgaactaaccagtaccccagagctcttgattctagctgcatatgtatcaaaagacggcctagtcggccatcactggaaagagaggcccattggacaggcaaactttatatgccccagtacaggggaacgccaggaccaaaaagtgggaatgggtgggtagggaagtgggggggagggtatgggggacttttgggatagcattggaaatgtaattgaggaaaatacgtaataaaaaaatattttaaaaaaaagtttgcaagaccaagaggcctctctttccaatgatggctgactaggccatcttctgatatatatgcaggtagagacatgagctccggaggtacccagggatccatcccataatcagcctccaaatgctaacaccattgcatacagtagcaagattttgctgaaaggaccctcatatatatgtgtcttgtgaggctatgccggggcctggaaaacacagaagtggatgctcacagtcagctatcggatggaacacagggcccccaatggagaaactagagaaagcacccaaggagctaaaggggtctgcaaccctataggtggaacaacaatatgaactaaccaccttatgtttttaatggagaaaaatgccaaaatctctccctggagaaaagacagatttttagcaaatggtttcaggaaactggatttctatgtatggaagaacaaaacctgaccctttctttcatacagaaaaaaaaaaaaaataatcaacttcaaatttatcagacagcttagtgtaaacccggaagccctgaaatctctaaaggaaagaagatacacttcaagagacagacattctaaataagactctgggttctccagaccaataattgacaagtgagtaccaatgaaatttcacttctcttcagcaatggagactgcaaataaagtgaagaggcagcccacaaactctgggaaactctgccagctgtacgtcaggcagagaagatgagccatttggtacataggcatgcccttcatctgtgattggtctattataaaaaagataagatcaagaactttctgtaatgttcccatccattaaaaattacctctccaagagttgatactgaattccaagctcaatactgcccccttgaggttgactgagaacatgcctcagagctctcaaaacttgtacagctcacatcctggcttgttttaagatcctgtatactctttctgttattttcatcttggcaaggcatccttcacccctttattctgctatcatagttaatatccacttttcactctgacaaacccagccagtaacaacatccaaagcccagaaagacatttttcttgaaatagaaaatcggtgtgctctctattaactcacctggctagattaactgtgaaaggttcaataccagtcccatgacatccacgtgtgaatgttctttctcatttaattataagaaattagtggttatatttattttaatgtcacgcaaaacatcagaaaatattaaagatgcctagaatattgataagcttattaaacaaatttacaaggtaaaaataattgaaggtcagttcttgctctaatttatttattggatattttcatttttattagatattttccttatttgcatttaaaatcttatcccctttcctggtctcccctgaaaaccccctataccctctccctccccctgctcaccaacccacccactcccacttcctggccatggcattcccctatagtggggtttagaaccttcacaggaccaagggcctctctttccattgatgaccaactaggccatcctctgctacatatgcagctggagctatgagtccttctgtgtgttttatttgactggtggtttagtccttgggtactcaggggaaacttgttagttcatattgttgttcctcctatggggctgcaaactccttcagctccttgggtactttctctagctccttcattagggaccctgtgcttagtctaatggatggctgtgagcatccacgtctgtatttgtcaagcactggcagagcctctcaggagacaactatatcaggctcctgtcagcaatctcttgttggcatccacaatactgtctgggtttggtggttgtttatgggatagatcacaaggtggggcagtctctggatggtcattccttcagtctctgctccacactgtctctataactccttccacgggtattttgtccccccttctaagaaggaatgaagtatccacattttggtcttccttcttcttgagtttcatatgttttgtgaattgtatcttgggtattctgagcttctgggctaatatctacttatcagtgggtgcatatcatgtgtgttcttttgtgattgggttacctcactcacaatgatatcctccagatccatccatttgccaaagaagctctaatttgtttaaatgccactgcatatatttaattgcttacattatgtattactatgaatagctatgcctctggtgcagtgtatgactgcccgcccaaatgcaagactcatttccatataaagaatgaattttacttagatttcatataaaagagaaattttgtatttctatgattaatctgctctttcttcatctttactttactctcctaaatgatgtcaacatgggaatgaataatcagctggatactatgggttttgccaaatcaggaccctaacattttaggctaaatagatcttcattaacgcttattagttaggttatcagcaatgtttaatgcacattttcttttcttggtattacatttagaaattcttgtgacatttacaaatagacaaaaaagaaaagggaaaatttgaaaatttgtataataaaaacattagttaatatgagagaaaattaaaattcaatgccaaatacagatttcccccataatacgcttctccttaatttaaaatgttttacataaaatttacccaaaacgtgtgcccttggatcatgaaattatgtgtcttacttttcatttctatttgtgacccagtcttttgatcccctgagttatcaacatttcagttccccaacccttattctgtgtggctggtatttctgttttagatttttcccctttattctttctcgtacttcagagcactgaatcaacaaattatgtcaagaggaagttgtaatgaatagtgttttcatatcaacacatcaccacattgaggactgcctttgctgataagagagtagctgtttggtgtgaagttactacttcaattgaaaaaaaaaaatcttgccttcattcttgggctttgaaatatatatacctatgagataattagagggaggggaggaagggaggaaggaagagagaaaaaaaaacttgtttccagttatattcttggtgcagtaaaattcatcataagggtccagttgttttgtgttgttgttgttattgttttcctctcagtgtgagtgtttcctaacaatacacgaagcaagggaacagaatgtctatttctgtgtgctgaataaaagttcagtttccaaaactggtgtggggcgtttctgattaaatcggcccaagcactgacaataaccatttgacaaaaccagagataatatattttacaatagtggagtctataggcaccgctcttaaatgacttgaactgcttcttatcagtctgtgtctctttgtgctcttctgaaccctgacaatttggccagatagctcagctgctgtgtgaaggttgcttatttaatctccttgtcaggttagaaattccacttgtgtcaattagtggaaggttgtgaaaatcttcaattccacatgaaacaagaagacattgcctccagaaaagctgagtgtggctttcacaggaggctcacattttataactgcagtgtggctttcttagtaggaatggatttatttccattaattaatttatttattcactttatatcccaattatacccccttcccagtcctcccctcacacagcccttccctgcattgcctctccccttcttttctgagagagtggcagctacccttgatattccccccatcctggcagatcaagtcattgcatttttttaacccggtgttcagctggttcctgtccttatttaactgatattagagtgatgttctgccatttgtaaaagagcttgcagagtttgattgctggtttgcatttagagtcacttcttaactgggggctttctactaaaggcacttagtaaagacataaagacataatactttaccaggtcactttcagttttttgcagttgaatagattgtgatggactgtatgaatgtgggtgacttccagtaaaaacacactctctctctctctctctctctctctctctctcacacacacacacacacacacacacacacacacacacacacacacacacaccctaaaatgtctcaccatacccatgcataattattgcatgcactatgagaaaagacagaagaatgcctcatctacaaaactaccttgggaggatgtcaacattagcactactagctgctagtctatctatatacgaaacattcatatacacagttacatctgctctaacacatgtcttttgcctccttgatgacaactgttccaaaagaaaacagtgatatctcttgatatgttttgatttgcattgccctaatattgagttctttttcataaatgtgttagaaatttgtgtgacttcttttgaaaaaaaatatatctgttttcttcctttttgtgttccatgttctttctagtgggttgcatgggttccttacacactttgcatagtgatccactgttggatattagttcacaaatactttctcccattttaaattaactatcattttgttgattattctccatgctatgcaaaaactttattagtcacatttgacttgtccatttttgtccttcttatctgagcttttcctttaaaatgttgaatgtggctgttgtctattaaaacaaacctttcaccgtgtatcctaggcagactttatggttgtgcctcaggttctcaagggctggcaacacaggcatgcactacaaacctggttcacagccaatattaataaattttgctcttcttttcattctagatattttgcacttttatatcttaaggctttggttcgttttttagttaaaggcgacagtttaatttgatttcattttgatggcttatcctgtaatctcataattggtctctaactattcatatgtatcatatgtattactccaacaacattaccttgtagttcaggataaggaacacttgaaactcatattttgtctccagaatttagcatgagacaagtgcttaaagagtgggaaactgtgaacatgaagtgttgccaagaataatacaaacaattataaaaccaggaggggaaacaacagagaccagtccaaagagagtccaatctccatgtccttagtggatattcaagacagacacactaggggaaatggacttctctttgctatgagcccatgaaaacttcctatgtctgcaaaggctatcaaagaacaaaacatttctgctcatattttccatagtccttatttaccccttattattgcctcctgttctctagttcaagttgtgagtatgtgaagtttcattatcattgttaatgggagaggctgggtaccagggctcaagagctcctgggtttcctcttcaagcatatctctgtaacacagtggggttttctaagataacagaggtcaggagaaaatggataatgttcatagaaaagcaagcaaggaagacacccttgaatagtaatcaaggcccttggtcctgtgaaggctctacgccccaatataggggaatgccaggaccaggaatgggagtgggtgggttggggagcagggggaggggagaggggagaggggatttttggaggggaaactaggaaaggggataaaatttgaaatgtaaataaagaaaataataaaaaagaaaaaatatatttgatatatattttagatagatagatagatagatagatagatagatagatagatagatagatacatagatagatacatagatagatacatagatagatagatagataaaagaaaagagtgatggatacttgaggcaagagaaattagactaaagtctctgagatactagacaacaagcagaaaatcaaggggcatttgtgaggaaaaattagaacaatacaaaaaactataaaacatagtatatgtctatgctgtaaattaaacccctatttaacttctttttctgagaaatggatgtcagggaaggttgctgacggaatagccacttactatctcaccacttatcacaaagctgcagaagtcaattaccaggaagtcaaagtgaataccttgtttctgaactctcacttcctctttggtattttattcttgaatggttttaactgaaatagaatggcatgacttttaccctcacttccttccctccagcatgccccaactgctttatataataaatatttcacattaatccttgcaagaaacaaaagtaatcaaaacacagaattgagatgacagtaaatatcatttattagataaaagctagatgcccaaaggtcttcatcatttccccacaattgacagtttttctctaggggacatataacctttgtgcatagacaatagcagaaaaggggcttagtggtacttgtgagccagggcagcagccactccagccaccaccttctggaaggcagcctgtgcagcgggggtgaaatccttgcccaggtggtggcccagcacaatcacgatcatattgcccaggagctgtgggaagatggaagaaccatcaacataactgtagagcaaaaataccagatactgcaggcttatttataaagacatttgtttgcaaccttaaactgctgacaaattattataagaatcctatgtcaaacagaatttatatgtaaaatatattcttcccctgtcaccctggcataaaagccaattatgctactattcttgagagctatgagaagaaacagggacatatcttccttgtcctctgagtaagttacaaggcaatatttaaaaagacaaacaaaagtagatcaaagaagaagaaatgaactgagggaaaggaaaggattagagaaagagagaggagagagagaaggactgggaggaaaggaggaggggaagctgatatcaggatgggaagtaaataaccagcttaattaatttagtaaaatgcaactggaaattaaaagcttaccaaagaaagaggaaatgacaacacagaacagagtgagggggagcagcgattctgagtagagaataaaatatccaaactcttgtcaacactccacacacagtcatggagactgctccctagaatcgcttcccctttccttctgataggaaggttgagcagaatagccaggggaaggaaacccaggaggtgcccatcagactcaccctgaagttctcaggatccacatgcagcttgtcacagtggagctcactgaggctggcaaaggtgcccttgaggctgtccaagtgattcaggccatcgttaaaggcagttatcactttcttgccatgggccttcactttggcattacccatgatagcagaggcagaggataggtctccaaagctatcaaagtaccgctgggtccaagggtagacaaccagcagcctaaaaagggaaacatagacaggggacactcaaagttagtgcctgctggaaagcagacctctgtctccaagcacccaacttctacttgtgagctgccttgtaacctggataccaacctgcccagggcctcaccaccaacttcatcggcgttcacctttccccacaggccagagacagcagccttctcagcatcagtcaggtgcaccatgatgtctgtttctgaggttgcaagtcaacacaacagaatcagaagcaaacgtaagaagcaactgaccctgctcagctttatatacccaatgctggctcctgcccactctgtcctctctgagcagattggccaatgccagggtgttaccctgcagggtgaggcttcagagatgacaaccatatctacacagggtggctatggcccaggcttaagacatttgagttctgggtctcactctgagtagtgtctgttcttatccttgcagctaattctgtttctataacatcttctttaaatactgtatttttcaattcttgcaccaataacatagcttgtctgttcaatattatctcttcaatattgtttactacacaaataaaaaattaaaacacattatacataagaaaatttgcctgttctgttttgttttgatctgggtatgttggttcgttttcttttagtttgagtgcacaagaggatcaccccaattatggaacataagaaaagaagacaaaataatcatttttctattgtttttctaactatttttcttcatgttttgaagaaaccttcaggtaggaaaataaatatatattcatttctttcatacttgtttggtttgtttccttcattctttaatttgttaatttagtcacatgatttatgggaagtagcacacaagtgaattgatcacgtcttggacattgctctctcttttagtttttgggagccagagaaggaaacacagaactctcaatttggaaaaaataaaaaagaaatacaaagctacttataaccctaagattagtggcaatattcagagataaagaaagagggagggaaagaagtgagaaaggttttcctagtgacaggtaaacccagtgaagggatcttgaaagatattctccctgtgttaagtgttgaagagttttcttcctctctctctctctctctctctctctctctctctctctctctctctctctctctctctctctctctctctctccttctctcactaattcagtcgctcattctgctgcttcctgggcactgtgtatactgcatatgttttagaatcatttttttacttcatagtccccacctattcccatttgtactctatatttttcattactcttaaattatttaattttatcttcattccttttcaatcttgttttgtcctctaaactctcacataaaatgtcctaaacttttcatgctaagaacttctggtgtgcttttccttcttggtattaaaaaccatgggaagccttaaataagctctgaggttcacacaaggagaaggtacaaaagtgggaggagaaggacctgggaagagaagcttctgtgtgagatgatgagggaggcacttagggatgagaatgactcagggcatgaaagagatatgtgaaaataagaagggaacttcccctgtgaagggaagaagcaacatgcactactgagtagtgaattacctcagctcgctctctctctctctctctctctctctctctctctctctctctctctctctctctctctctcgctctctctctctctctctctctctctctctctctctctctcctttctctctctctcctttctctctctctctcctttctctctctctctcctttctctctctctcctctctctctcctttctctcactctcctttctctctctcatctccctctctctttctctttctctttctccctccttccctcactccctccctccctccctccctccctccctccctccctccctccctctctccctctctgtgagcccctatgaatcctgcttacttgtttagtcagtctgttctcacagagtccttaatacctgactcctacaattcttcctcgtcctcttccttgggatccagctgctctgcctagtgtttggctgtgggtctctgtgtctgctcctatccgttgctggatgatgatctccaacgataactgaactgggcaccaatcaatcaatgagtacatgagaatatcatcaggcatcatttcattgactttttaaaaaaagtttttgcctgtcttgttcaatcatgggtctctaggctgaatacctctggttcttacatcctgactaatttttctttttcattttttattaggtatttagctcatttacatttccaatgctataccaaaagtcccccataccgacccacccccactcccctacccacccactccccctttttggccctggcgttcccctgtactggggcatataaagtttgcgtgtccaatgggcctctctttacagtgatggccgactaggccatcttttgatacatatgcagctagagtcaagaactccagggtactggttagttcataatgttgttccacctggggggttgcagatccctttagctccttgggtactttctctagctcctccattgggagccctgtgatccatccacctgctgactgtgatcattcactcctgtttttgctaggccccggcataatctcacaagagacagctacatctgggtcctttcgataaaatcttgctagtgtatgcaatggtgtcagcgtttggatgctgattatggggtggatccctggatatggcaatcactagatggtccatcctttcgtctcagctccagactttgtctctgtatctccttccatgggtgttttgttctcacttctaaggaggggcatagtgtccacacttcagtcttcatttttcttgagtttcatgtgtttaggaaattgtatcttatatcttgggtatcctaggttttggactaatatccagttatcagtgagtacatattgtgtgagttcctttgtgaatgtgttacctcactcaggatgatgccctccaggtccatccatttggctaagaatttcataaattcattctttttaatagctgagtagtactccattgtgtagatgtaccacattttctgtatccattcctctgttgagggggatctgggttctttccagcttctggctattataaataaggctgctatgaacatagtggagcatgtgtccttcttaccagttggggcatcttctggatatatggccaggacaggtattgcgggatcctctggtagtactatgtccaattttcagaggaaccgccagactgatttccagagtggttgtacaagcttgcaatcccaccaacaatggaggagtgttcctctttctccacatccacttcagcatctgctgtcacctgaatttttgatcttagccagtctggttggtgtgaggtagaatctcagggttgttttgatttgcatttccctgatgattaaggatgttgaacattttttcaggtgcttctctgccattcgatatccctcaggtgagaattctttgttcagttctgagccccatttttaaatggggttatttgattttctgaagtccaccttcttgagttctttatatatgttggatattagtcccctatctgatttaggataggtaaagatcctttcccaatctgttggtgttctttttgtcttattgacggtgtcttttgccttgcagaaactttggagtttcattaggtcccatttgtcaattcttaatcttacagcacaagccattgctgttctgttcagaaattttttccctgtgcccatatcttcaaggcttttccccactttctcctctataagtttcagtgtctctggttttatgtgaagttccttgatccatttagatttgactttagtacaaggagataagtatggatcgattcgcatccttctacatgataacaaccagttgtgccagcaccaattgttgaaaatgctgtctttcttccactggatggttttagctcccttgtcaaagatcaagtgaccatagatgtgtgggttcacttctgggtcttcaattctattccattggtctacttgtctgtctctataccagtaccatgcagtttttatcacaattgctctgtagtaaagctttaggtcaggcatggtgattccaccagaggttcttttatccttgagaagagtttttgctatcctaggttttttgttattccagatgaatttgcaaattgttccttctaattcgttgaagaattgagttggaattttgatagggattgaattgaatctgtagattgctttttgcaagatagccatttttacaatgttgatcctgccaatccatgagcatgggagatctttccatcttctgagatcttctttaatttctttcttcagagacttgaagtttttatcatacagatctttcacttccttagttagagtcatgctgagatattttatattatttgtgactattgaaaagggtgttgtttccctaatttctttctcagcctgtttattctttgtgtagagaaaggccattgactagttttagtttattttatattcagctacttcaccgaagctgtttatcaggtttatgagctctctggtggaatttttagggtcacttatatatatactatcatatcatctgcaaaaagtgatattttgacttcctcttttccaatttgtattcccttgatctccttttgttgtcgaattgctctggctaatacttcaagtactatgttgaaaaggtagggagaaagtgggcagccttgtctagtccctgattttagtgggattgcttccagcttctctccatttactttgatgttggctactggtttgctgtagattgcttttatcatgtttaggcatgggccttgaattcctgatctttccaagacttttatcatgaatgggtgttggatcttgtcaaatgctttttctgcatctaatgagatgatcatgtggtttttgtctttgagtttgcttatataatggattacattgatggatttttgtatattaaaccatccctgcatccctggaataaaacctacttggtcaggatggatgattgctttaatgtgttcttggattcggttggcgagaattttattgaggatttttgcatcgatatttataagggaaattggtctgaagttctctatctttgttggatctttctgtagtttaggtatcagagtaattgtggcttcataaaatgagttgggtagagtaccttctacttctattttgtgaaatagtttgtgcagaactggaattagatcttctttgaaggtctgatagaactctgcactaaacccatctggtcctgggctttttttggctgggagactattaataactgcttatatttctttaggggatatgggactgtttagatggtcaaattgatcctgattcaactttggtacctggtatctgtccagaaatttctccgtttcgtccaggttttccagttttgttgagtataaccttttgtagaaggatctgatggtgttttggatttcttcaggatctgttgttatgtctcccttttcatttctgattttgttaattaggattttgtcgctgtgccctctagtgagtctagctaagggtttatctatcttgttgattttctcaaagaaccaactcctcatttggttaattctttgaatagttcttcttgtttccacttggttgatttcacccctgagtttgattatttcctgccatctactcctcttgcgtgaatttgcttcctttttttctagagcttttagatgtgttgtcaagctgctagtatgtgctctctcccgtttcttcttggaggcactcagagctatgagtttccctcttagaaatgctttcattgtgtcccataggttttggtacgttgtagcttcattttcattaaactctaaaaagtctttaatttctttctttattccttccttgaccaaggtatcattgagaagagtgttgttcagtttccacgtgaatgttgactttccattatttatgttattgttgaagatcagtcttaggctgtggtggtctgataggatgcatgggacaatttcaatacttttgtatctgttgaggcctgttttgagacctattatatggtcaattttggagaaggtcccgtgaggtgctcagaagaaggtatatccttttgttttaggataaaatgttctgtagatatctgtcacgtccatttgtttcataacttctgttagtttcactgtgtccctgtttagtttctgtttccacgatctgtccattgatgaaagtggtgtgttgaagtctcccactactattgtgtgaggtgcaatgtgtgctttgagctttactaaagtatctttaatgaatgtggctgcccttgcatttggagcgtagatattcagaattgagagttcctcttggaggtttttacctttgatgagtatgaagtgtccctccttgtcttttttgataactttgggttggaagtcgattttatccgatattagaatggctactccaccttgtttcttcagaccatttgcttggaaaattgttttccagcctttcactctgaggtagtgtctgtctttttccctgagatgggtttcctgtaagcagcagaatgttgggtcctgtttgtgtagccagtctgttagtctatgtctttttattgggaaattgagtccattgatattaagagatattaaggaaaagtaattgtttcttcctattatttttgttgttagagttggcattctgttcttgtggctgtcttctttttggtttgttgagggattactttcttgcttgttctagggcgtgatttctgtccttgtattgcttcttttctgttattatcctttgaagggctggattcgtggagagataatgtgtgaatttggttttgttgtggaatacgttggtttctccatctatggtaattgagaatttggccgggtatagtagcctgggctggcatttgtgttctcttagtgtctgtataacatctgtccaggctcttctggctttcatagtctctgtgaaaagtctggtgtaattctgataggccttcctttatatgttatttgacctttctcccttactccttttaatattctctctttatttagtgcatttgttgttctgattattatgtgttgggaggaatttcttttctggtccagtttatttggagttttgtaggcttcttgtatgatcatgggcatctctttctttatgtttgggaagttttcttctattattttgttgaagatattagctggccctttaagttgaaaatcttcattctcatcaactcttattatccgtaggtttggtcttctcattgtgtcctggatttcctggatattttgagttaggatccttttgcattttgtattttctttgactgttgtgttgatgttctctatggaatcttctgcacctgagattctctcttccatttcttgtattctgttgctgatgctcgcatctatggttccagatctctttcctagggtttctatcttcagcgttgccttgctttgggttttctttattgtatctacttccctttttagttctagtatggttttgttcatttccatcatctgtttggatgtgttttcctgtttttctttaaggacttctacctgtttggttgtgttttcctgcttttctttaagggcctgtaactctttagcagtgctctcctgtaattctttaagtgatttgagaaagtccttcttgatgtcctctatcatcatcatgagaaatgtttttaaatctgggtctagattttcggttgtgttggggtgcccaggactaggtggggtgggagtgctgcgttctgatgatggtgagtggtcttgatttctgttagtaggattcttacgtttgcctttcaccatctggtaatctctgaagctagctgttatagttgtctctggtaagagcttgttcttcaggtgactctgttagcctctataagcagacctgggaggctagctctctccttaatttcagtgggcagagtattctctgcaggcaagctctcttcttgcagggaaggtacccagatatctgttgttcgaacctgcctcctggcagaaattgtgttccactcactagaggtcttaggatcccgttgggaatcctgtgtgggctcttgcgggtgtcaggcgattccgatggcaaggcactccagtgctcgagtggagtggaagggacttgtggcccgggtcaggcccgggtagtctgcttccctatttcctgcagtctcaggttccgctcgattggattgtggcagacgctgtgttccactcaccagaggtcttaggatcccgtggggaatcctgtgtgggcccttgcgggtgttggtcgactccgctggcgaggtatcccggtgctcgagaggggcgggagggacttgtgctgcctgatttttatgaagattttagtatgctcaggaatgtaagattaagattcttgaagtgaatctggagtagttctgtatctgtcctacaagcctgtgatgtattgggacttccccagaagtgaagaggtctcagtacctatgcacagctccatgtacaggaaaaaatagatggatataagagagcatttgcactcagcctgacacaacaaaccatctatacacatccatatatgtgtgcaataatactgatgaaaagagaatttgaaggagagttgtgagagttatttgaggttgtttggggatagagaggaggaagaaacattataattaaattataatctcaaaaacaaagaaacaaaagctataaaataaacataacatattcagtgtagtttgttatttatacatgtcagtgtataacagcagagttactatgaatgtacactggcacagatcattgttatgttctgtttaccaggtaaataaaaaaacaataggaacacagtataaatataaataaatctatacaaattagaatctcttaaagccctcataacttcatatatgacaagaatggtggcgaaatgagcagttctgcttactgggaaggcttctgtgatggtttcctgtgtactacttcactggctactgtagtatttatgttagagctgcaatatggttgatggtattattcctcagattaaactccagccacaaaagttttaagaccacctaagtacttctgtgattataaaaagaagtggccatatcagcctaatttagccttgtatataagggagactatgagatagatgattcttgggtttttgaaagtctcagttctgatcatgatttcttttcaatatttttatctgtgtgaaatgacaatcaaaattgttaactagcctaaacatgtacctccatcaaataattaactctttcatcttgaaaatgtaattatcagtttataattgattaaaatatatttttacattatacataaaaacttataaagtgtataatatggttttagacagaactataaactagcttataacactgccactatcgttcctaaggagaaaatcacatagacttccaggttcttatcacatatcaccatagattcaacagtcaaggaaagctgtctgaaagctgtggtttttttttttttttttttttttttttttttttttttttgacagtgaagaaatgttttattcttcattcatagaattgctattttaaaaataactgtatgaacaatggtatcaaaaggcatgttaacctggattagtggaggtggatttctttttttttttaatattttttattacatattttcctcaattacatttccaatgctatcccaaaagtcccccatacccttgtgtgtacattgctgagtaaagtgacgattgcatacgctgtgatgattgatggctgtcaagatatgagactccttttctttctttttttttcttggggggggcaggaggtttgagacagggtttctctgtgtagccctggctgtcctggatcacactctgtagaccaggctggcctcaaactcagaaatctgcctgcctctgcctcccgagtgctgggattaaaggagtgtgccaccaacgcctggcatgagactccttttcatataaatgataaattatacctcatatttcagaccaaagcaacactatatcattcatccatgcttaattcaagttcccttatctttttccttattgagtcagcaaaggaaaaccataaagagattctatctaatttgccaagtctgggcatttaaaacttcccctctggatagctattcatggatgtctattaatttagtgatcatagagctttactaaatatttctttcttttaaaaatattaggagaatttgaagaatacaggtaacagtagaaacagcctgatgataagaagaacaagtaatgttatggaccttgtgctgtgttactacgataaactcattgttggcttaaagacttttgcccaaaataatgcatgaacagattagcttgctaagtggataacaataaagtcatgctccttttaaatcattagaatctttcccattataagcccctactttgactttcctgggttagcagcatttctctctcccttccccttcctctgtgtggaactgtatgtgtatgtgtatgtgtatgttgaactgcatgttcctcttctcaagtcaccttacatacctctctttttcactttcttgtgtcctaacccttattttgtctggactgatgaaactttctgcatttgtttccatttccatgatatttaatattattcattctctgatcagtgtccattgagagggcttgtaaacaaaaaagctaaactacactgttaagtcccttcctgtttgtgtacctaacaagatatgtggtacacttatcaatagagtattgagatgaatataattgaatgctagtttattttcatttttggtactctagttaagtaactcaacaaatatttctatcacgatgagacagtcagcagtaatatttttgtatcaacacatcagcacattgcatgatctggctgctgacagatacagctaactattgggtgtgtacttagcatataacttttaaaacacatatgcaaagtgtatttgtttcttaggaaagtagtggggaagaactttgcatacatgcctccagctacagttcatccagagggtaacattcaaccaggcctctgacagttcttccagatccagagagcaactttcgactagaccctatggtaccagtacctggaagcaccatgggaaaagccaccagcactgtctgcctcagagaaaacaaaactaatacattttaattaggattcagtcgaggaatgcaactgtgaaatgatgtctactaccaactaactctctataaaccaagatctattactgatcttcattaagtcaagaaaaaacaggcaagggttctacctactgcaaaaagaattgctcatcctatctttatggctaggcaaaagtcttacataaattatgagacagttataaaaaattcagttctatttgcaaacaaaagatactgctctgagaacactaagatatgggttttagaccattggatattgcattcagagaggaccatattttataaatactgcttggcttcttagtaataataaataaggattataaatatgcacgaaatacctggccacacaactacctttatgggtcctatattttgttcttgatggtttataatttctcaccatactctaactctttacttcgtttggagctgcatttttatgactcatgacaatgactcaaactcataatatttggtgtattttattctgtacctacacaaaccattctgtaattaaaggccacttattatatgtagtcatttcaaaatctcactaaaactgtaccagagagtagcgtaaagaacacttggaacacacattttatttccggaattgtgcataacctggtggttatggaaagaaaaacaaatcaagggtatattacctattgtgttaactctagtaactccatataaataaaagcagtccaactgtatgaaggagagattagatcccaacccacactggatattcaagatagatttattgaaaaaaaaatgcttccatttacagggtattatggaaatttcataagaccccagtaatgagccttaaaaac

SEQ ID NO: 517 - DNA, 25525 bp, Mus musculus
attttcctaggctgtctattataggcaagaaaactttaaactgaacccacagaacattttttaaaatgttatgctctagttgtaacagatatgcttactttcagtctgtatgacatggataccatggtcatcctgttagcttaatgtgttcataagaaggtgcatcacaccaaacgtagctattttaacatgtataaagtatccatattctagtcaatcctatgtatatacattatttagtaggtaatagtctgccaaatagtctatgccatgagaagataagttcacatctatactggccatgggttagaatctgtactcaaaagataatgtagagaaaaagctgacagagggccagagattcaattacttgtaataatgccaatttggggacactttaaacaagataatgcttctgtaagcatagaagaaagtaaaacaaaggtgttctcatatgtcagaaatggctgttagacacataacaaatcatcataaaagccagggcaagccaaaggttatagagaagatcctctgggtaaatttggaacacaaagatttgagacaccgaagccacattgctaaatgaaaaataggcactatcacttgggccccacaagaaaaacaaacaaatgtaaaaaataaaacagaactaaactaaataaaatgaaagtcttggaagagaaactcttaggggggttaggagcacaagaagccatagaggaggtaaaaggaagaaatgcaggcagaactgaccagaggcaggttggaggacaactttcctataaataggaaagccaaactgtgaccaaatctggagccttcctcccttggtcaacagttctctcaccttacagttatatcacttttgtgattctgtttatttgaataaaaggtggataatgataactgtcttgccagatgcagattaaataggatggtgtaaaactatccttcatgcacatggatgcagttaaacacatacaaatgtaggcttttaatttcaggtccaatacgtaggagatagctaataattccaagaagagattagaaatcaagcacactagccatcctttagttataataaacactatccacaaatgtttctcaaggatattgatgaatcaactcactcattcctcagttgaatcacaagcctagtttaaagttatttcagttccacctcacagatgagaaatatctatatgggattaagcaaggaaaaagatcaaagcaatattactaacggagtaaggttcacaaaggtttggtcagagaactctctagaatcacaaaacaagaacttgttatatccatcttctctacactgtcacttcctgttgttgtattttggaattgagtcttcggacccattgtcaatcctttgctactgtattcatcctccagatgcaactatgtataagtcttgtctacttggggcaatatatatctaggagatagagttataaagcacatatcccaagaaaaggagaaacagatgtaatattggcatttctgtgtccacagcacaaattccttttttcatgagtttgttcttattattatagccattctttccctaaacggtaaagttattttagactggattttttttcctatagtgggctaaactcctctttctgtgcctttgttggaaaaagtgataagagaaatgggcgttatactgggagtttacatgtggagagtagaaaatgaaaagagaataagcaaaacaaagagagtttttgttgaaggaggagccaaaaaagaaagaatacctccatatctaatgtgcattatcataaacacagtgtacagtttttgctgaccctcccatgacctggctccacccatgaggaccacgggtcaggctgaccaatagcttcaaagaataatgcagaacaaagggtcagaacattgtctgtgaagcataaaaggccaccacttctagcagcagtacatacttgcttctgacactcctgtgatcaccagcaacctcccagacttgccatcatggtgaactttactgctgaggaaaagaccctcatcaatggcctgtggagtaaggtcaatgttgaagaggttggtggtgaagccttgggaaggtaagaattgtttttagggtacaaagagctagggaaatcaagaattctgaggctcccttatatttctacttgtctttctccacttcacaggcttcttgttgtgtacccatggacccatagattttttgacagctttgggaacttgtcctctgcttctgccataatgggcaacccaagggtcaaagcccatggcaagaaggtgctgactgcttttggagagtccattaagaatctagacaacctcaagtctgccttggccaagctcagtgaactgcactgtgacaagctacatgtggatcctgagaacttcaaagtgagtctagggcaatgccacaaatttattttggatttgtctcggggacaaaatgagaagccaagaatatgaataagggggtgcttacttagctgtcaaagttaattaattggtcccagtagggtgacagtgaatggctgtaagaaacctaaattagtttacaaacatttagaaaattttgtcgtgataaaattttcttggatttatcatggagagtaatatgaaaagtagtagatctatgcaagaagaaatggaatagggagtggaaaaatcttaactttttgtgggtcctattgattgatgttgaagaaaagtcttgcaagacaaccttatggtgaattttctcaataaacataaaattgtattaaatttccaggtgaatatcttgacaaatggaggcttgttcttacattgggggtagttttaaaactccaccaacagcagtaggaaaacacaaattctgaatttacagatactagacaactgtagaatgagaataacgacaggcaaataaatatgctgagaatagaaggtatgagaatccaggcagaacagtggtgagtgggaaaaaaagaggaacaatagaaaaatggaatctctgctcatcagagatgattgaggaagctttgatgctgaatgtgttaaagagtatgggttcaaaatatttctttgtttttttaatgcttattcgtttcaaatcttcatttaacacaccgatttgtttcttttgtctttccatcaacagctcttgggtaatgtgctggtgattgttttggctagtcacttcggcaatgaattcacagctgagatgcaggctgcctggcagaagctggtggctggggtggccactgcgctgtcccacaagtaccactgagccctctctctagctgtccagcaatcctgtgtgtccgctatgcctcctttctgcacatgaatactggactgttccttgaaagcacatcatgtttaataaagatcatccttcctggtaatcaaaaattcagttttgtcttgtctgctttctacttttatgctaaagacacatatttgatgtgtttttggaaagggggaagcacaggaagactcaggcatttatctgaaacctgcagggactcaagagagaaacgtagaagccatggaaggcttctacaggcccagtgagagtctaaagctgagaaagaattctcagagagaagaaagaaatttagtggagaaggcattgtgtatggaacatatgaacatttactgtagagggtgaagaaaagggtgacaagtgataccttgcagcaggttgtgacatcccattaccattaggaaaaagcttttacaagatccaagagctaatttagaattaactttctttaaaaaagcatttgttgggtaaccaattggtgtgctctgccccggggaagactcttgatccagctctcagcaacccttagttgactgtaattctttgtgtatggttgaggtctcatgggctttatttaccccacccatattagcaaatgtgtatcacagcaagcttcatggtcttttggctcttacaatcttttgcccttcttctgaagtgttccctgatccttaggtgtgtagatgtatccactgaggttaggctccacaactctgaagtttgaatggttgtggatttctgtactggtctttgtctattgcaaagagtgttctacatgagaggagaagactacaacttatacatatacacacacacacacacacatacatacaattacaatggcaaaatgacacgattttgaaacatggggagggggcaacattggagatgtaaagtgaattaattagtggggaaaaaagaaaataaaaaagtaaaaaaaaaatcataataaaagtaaattattttttaaaataattaaaattaaaatttgcaactgttcagaaaagtttttcagacagacatttggtgtctcggtatgtaagtcagttgatgaaatgaatctctggggtatatgaatcctgagactggagcactaccaaaaagacacaaagtagcagacttatagagttggttatagaatcctcctcacttttgtgttttattttagaaggtagcagatacatgtaagtagactagcccttgaaattgacattttgttctagggaaggagaaataccctatttatgtggattctaatgactaacccttcagcaaaaatacgagagaaaacttgacagatgtttctcattggtttgatgaacttcctaaaaaatattacaatcccaatgagtaatatcataagtagtccctgcttccttcattataggaaactctagtaaatacatggtaatcctgtatttgtagaagccaggccattgttgaatgagaaaaggggcaagaaacaaaagtggcagactgaggaaaagtaaggaacaagtagagaaggaccgaatggggtcgaggagggcccttgagcaatgagattgaaccagcatcctcattagagtggacagactgctggggagtcctcaaggagactaacttacaaatgctgtttgtcctgtaaattcttttctttatttccttttctcatttttgtatatctttttgtgtttccttccatagctcctgggtaacatgctggtgattgttctttcttcttactttggcaaggaattcacagctgaggtgcaggctgcctggcagaagttggtggttggggtggccactgctctgtcccacaagtaccactgagccctttccctgatgtccagcattctgtacacccctcagctctgccatacccatggccactgtgctggtctctgaaagcagggcttctgcttaataaagtccattcttttcagtaacccatgagtcatattttgttgtgtctgtttcttacttttgtgtttaaagaaagaaggctgatgggcagatggtaagggagcgagacagaaggacgcttgagtttcttttagaactttgctggaattcaggagaggaaagtagatgttacagaatttttctagagccccaggaaagatgagaagttggggataattctcatgtaggaaagcaaagggttaatgccgtggagaaaaaagttctgtggtagtcactaaaacttagtgtagagggtgaagaaatgcatgacaaatgatcacctacagtctgtgttatgtgccatttaattaagttaaactttagacagatctaatgctcaacctgagataatcagtttaattattttaaaaaataatttacttttattatgattttttttacttttttattttcttttttccccactaattaattcactttacatctccaatgttgccccctccccatcccccctcacacaatttcttctcacatcctgcctcttctcctctgaaagggttgatcccctcctagggtatccccgcccacacacacacaaccctggcatatcaactctcttcctgactaggcacatcttttcccactgaggtcagacaaggccatccacttaggggaattgattctacagacagtgaacagctttagagacagacaggcttatattttccagttgttgggggaaccacaagaagattgagctacacatctgctacatatgtgctgggacctaggttcagcgtgtataagctctttgattggtggtacagtctctgagaccccctaacagtccaggttagttactctgttggtctttctgtggagttcctattcccttagagtccctctatcttacataagagtcccaagctgcattcaatgttggcattcgtttccaggaggggttcaggtttaagtgtgggaggagacaggagagggggccaaagggcctggagaatgaatggaaatctgcagttggcaatgttgtaggtatgggggaacattacaagaatgtgccataaacctgagatgggggaggctcctgagggttcatgggggaggtaaccttatctgagactcatagcagtgggggtatggaatctgaaaagtccacctacagtagccagactggaagtccagtggaggaataaggacactaacccatccacaaaacatttgaccccaatttgttctgtctacaagaaatgtagaaacagagagggaacaggaattgagggaatggccaaccaataacaggcccaactgtagaaccatcccatggacaagcactactccttgaccccatactcacttatgcttgcagacaggagcctagcatcaccatcttcctagaggttccacacagcagctgacttaaaaaaaaaagatttatttctcttaatcaagtatctctgcatttatctgtgtttgggtttgtgcacgtgagtataggagactataggcatcaagttccactagagctggagttacagatggttgcgagctgtatatgctgagaattcaggtgctctgaggaaagtatttgctctcaaacacggagtcatcatctctcccacgctaaatgaacattctccaacagatactatatcagatgtcctctggaactgatgaaagaaaagggacaagttgatagaaagcattaaatatataagaaaaagtttcaatgaaaccaccacttcagacttgttttttgaaggcattccttgtctcaaggaggaatgaaagctaagagatgcgaccactgtgcttttctgtgctactgtaataagcaatatgattatgatagggaaagaatataaatggaatcttctccagacaggtgggcatgataatttcatacacaggacatctacaaaaatgccaaaaagttctgtcatttaaggtcactgaactagatcttgatgatttgtataaaactagaagatgctgaagagataaaatactggcaaaagtagacaatagggatcttaattataaaaatctcaatattaatactttattaagcattaaacaataacacttacctggtgaaatatgcttatcactccactacttgaaaggctaagcaaagtgtcacagtttcaagagttacctgagcaacagattgagttcaaggacaaccaaagaactcaatgagttgctacctcagaatgaataataaaaacctggtctgagggtgctgctcagagcagagcactgtcctaacatgtggactgctagggaatcaagatccactagcactaaacaaaagacaccaactgaattgattagtaaagaataagcagtctcaggatttctgactcaagaaatggtattactaagaaaaatattcttaaggatccaatttaacttaaatgcttaggaaccattacagagatataaaagtttaaaatgaagaggtgaagcaaggcatgcaacctgaggtaatgttcaaaggtgggatgggggagacagtgtcagattaactctaatatatgagaagaaaacagaagatagtagaagatgaaatcacaaatactgagtggacataactacataaagtgtacattgacttggaaaactcatgtggataaaacacacttgagagaatttaaaggtgctcaaagaaattcaagccctagtcaatctcttgtcaaggctggtgatctttaagtggtagaggtaagataaccacattttagctactaaactatattccctcatcctgattccatagattggttagagtatgactggtggattgtatttcaagttgtctttgtccactttaaatatgaaagaacaatgattcttgtagttttaggctatcaacaacattggcctttttggtctacagcatttcaatatggcaattaacaggaaaacaaaccaaaccaaacaaacaatagcaacaaaaatgcaggcgttgtatatgacactcgttttctctggacctgtcaagagatgagacaatgcccattttttataaatttacttttctccttatgccatcatgaatattttggctctagaaatcagcggataaaagatggcaattatgcagtggtgggaggaaagtatatttgccaaatgtttcagggctatatatacctataaccactccaatggaaaaaaagagataactgaaaaatagttcttcatatgtgcacacacacattcacatatacaggtaggatgataaaagacttttgcttgttttatttctcaagacaaggtcctcttctgtagcttcgatggcttagaacttaatatgtagactgtgtgctagcctcaagctcacagagatgtgtctgcctccttcttctgagtgctgggattaaaggcatgtgctattctgtgcagcctatgatagtcaatatacatttgcaataaaaattatttgagagaagtactatgaccctagaatagtagtgcataagaaatgagtagtattcaaaggttatgtcattatagtttctcattcctattaaggaagatggattcctctgttagattatgagcactgcagcaacacacccaccatgttccactttattatttttatatttagtgatcatggatattatcagcttcactgtcacagaaatatttattttctcttccttcagaacactgaatttgctattacaacattttccagtatctttctgtgacatgttacttctagacattctggacacaacaaacttaactcttcattatgtagagaaactgaattccataccaccatgtcctgtccttgttaatcccaattgttaattttcttcctagtaataacatattaaaatcttttttgtttgatatacttactcatttctgtatcttctatctcctagtgaatgaggctagagaaaagttctgtcttgtctctcattcattataaatcccaggacttgtgaaggataattctacagagaggcagcaggaatgggtgggtgggtgaatgaacaccctcatagcagggggaggggagataggataggagggcttggggggatgggaaaggggataacaattgaaatgtaaatttaaaaaatcaataaaagagaaacaaaagatcccaggactaataataataattatcacatagttatgagacaaataatgattgagtgaacatttgagattacatgaattagctgtcataaagaaacggtttcaaaatcctggactaacatgacatggggattatggagggtctattaatagacatgaactaattaatacaactttgtaggaaattcccccaagactctgctgaagagcaacttagggttactggttaagatatttggaagcttaaactcaggactaccaactatcctccaagattaaatcatggagatagaagctaaaggaatatatatgtacatatttgccatctcacgaatgacttccttttaaaagatcatagctctagaaggtaccagagatcggggagctgagaaactttcaggattcaaagggagggacctaagatgaaatgccctataatgagaagagggaacttgtagagtccacctccagtggaaagacagggcatcaagtgtagggatggtgttgccatcccacagtcataaactctgacccaatactgaaggataattctacagagaggcagcaggaatgggtgggtgggacgaatggagaagagcctgaggaaaaaaaggttcagtgactggccctatttagaatccagttcatggggaggctccaaggcatgacactattactgatattatggtgtgcttacagacaaagtctagcatggctgtccaacatgaagctgagtcagatgcagatacatacacctaaccaatggacagaagtcatggacccctgtggatgaactagggaaaagctggaagaagctgatgaggagggcaaccctatatgaagtttcaactgacctagactcctgagatctctcacacactgagccaccaaccaggcagcatacaccagctgatatgaggtcactgacacagatacagcagaggactgccttgtctggcctcagtgagagaagatgcacctaacctttgagagacttgaggtcccagggagtggggaggtctggtgtagtgggagtggggaggcatcttcttggagataggggaggaggtatgggatgaagaacaatcagaaggcagacggggagggagataacaattagactgtaaaaaaaaaagatttatcagtgaaaagaaagaaacagagggggggagggagagggggagggggaaggggaggggagggggagggggagaaagagggagagggagaaggagaaggagaaggagaaggagaaggagaaggagaaggagaaggagaaggagaaggagaagaagaagaaggagaaggagaaggagaaggagaaggagaaggagaaggagaaggagaaggagaaggagaaggagaaggagaaggagaaggagaaggagaaggagaaggagaaggagaagaagaagaagaagaagaagaagaagaagaagaagaagaagaagaagaagaagaagaagaagaagaagaagaagaggaagaagaggagaacatagctggttcttgttaacattgcatgttctttacagccatgcaaataaaaatctctattgaccactacgttaaaatagctacaaaaccttaaaagctgtcagtagaaactcactgctagggatgaacttcataatgtataatccagtcctagctgtgatagtgcatgtgttactgcatggaaataccctgtctcttcacagttaggttacaaacacacaaaaagtgaaaacagagctgagttgaagaaacctgaaagcttgatcatttagtgttctcagtatttaaccagtaatgatcatagagaaggctaaaccctcacccttttcaccaggcagctacacttatcctgggtgggtgggtgggggctgccaattgtatggtgtcaacactgtgcattcaatgggtggaaaatgctgtcatgtacacagacttctctactttagtgtatgatggaatgtggagacatgttgtacttctacacagtaatacatatatatatatatatgtgtgtgtgtgtgtgtgttataaatatgtgtgtgtgtgtgtgtgtgtatatatatatatttttacttagaaactgaaatgtattaggaatggctttcctggggctgtgggaaataagaagatcatgtcctaagcctactgaaaatgcattcaatggttttgcacaccacatctttcttatacgtggcttgtgagtaagactcatatttctatcacttaggttcgtaaccccattcctaaaaatagcctctggctcactgaggcgttcccatgtttgcctatgcttcaacttaaatgtattaatccctctaagtctgaagtgaaaaagggaagaatgtgaaagacacccttgcaaatctcctgttgggggaaggagctaaagagaaggaaagaaggaaagaaagacggtgaactctgggaaagctgcagcaggaggctctgtctctccgaggcagggggcctactggacactatcttagtgcattgctatctagaacttaccccactggaccccacccctgtcttgcccagactctcttgaccaatagcctcagagtcctggggaggggtaaggggagcaaggtccagggtgaagaataaaaggacaggtcttcagcctcttgaatacacttgcttttgcacacttgagatcatctccaagcttctatacctcacaccatggttcacttcacagctgaggagaaggcagctatcacaagcatctgggataaagtggacttggaaaaagttggaggagaaactctgggaaggtaaggaatggagggaaattgtccttgtgcatggcagaaatttccagggtttctatagggttttgtggcacactaacttttaactgctaatgccctatgtcttaggctcctgattgtttacccatggactcagagattctttgacaagtttggaaacctctcttctgccctggccatcatgggaaacccccggattagagcccatggcaagaaagtgctgacatccttgggcttgggggttaagaacatggacaacctcaaggagacctttgctcatctcagtgagctgcactgtgacaagcttcatgtggatcctgagaacttcaaggtcagttctgagcatgctcatgtgttcattatggattttactagggacaatacttggagttgagactgtgcttggcaatgccttgacagaggttagagtccatgggtccagaattcttgtcagtaaccgttgtagaaatcttaatatttagctgtgcatatgttctgggcaacaatgatttgggtgcagatttgagtgagctcccagcatttctggggccttgggtttgattctgagcattggaaactaagcattcaaatattggaattttttaaaaaaggagtatgtttttataaattaatacatctatgcaagaagaaactgaatttaagttaatatcttatcatttgaaaggaaaaataccttaattaattgtgtcaatcttaatgtccaatcctttatggaagactcgaggaggaaatcaaaatatagggtttttttttcttattattttgacaactttctaaatgttttactttcccactgagcattggcacagtttgagccttctctttggttgaacactcaaatctactaagaatcttgtatcgcagtcatgtgttgatttagatttgaccattgatgaatgagacagggagcaaaaaatgggaggagataaaaagggcagaatgaggaaaggtacagatatagccagttgagtggtgtacaagaggagtcatgtaattcagttgtcaaatgcataacaggagaagtgataggtagtgagggactggaatcctcaaggaacgtaacttttacacgtcacagatttgaaactactgatcattcctatgtgcctttttgttacagctcctgggcaacatgttggtgattgtcctttctactcattttgccaaggaattcaccccagaggtgcaggctgcctggcagaagctggtgattggagtggccaatgctctgtcccacaagtaccattaaactccattccagtacactggcaatcccatgtgtctatgatgccctctttgagtccatggggactgcattgagagcacaaattttgtttaataaaattgattcttaataacattgactttttgttttttttttgtttgtttttacttttatgttgaagaaagatctcaatgggcttgttggtgggaaaagacagaagaagaaaccagatagagtgaagtattagggaaagagctaagttaaagatgagaaagttttctccaggaagagatgaaagggtctgttcagtataagatagggtacaaaatatttactgtgcaaggtaaaaagtagggttgcaggtgccaggaggtaaagaagactggtgagatgtgctatttcttttttaagtttcactttttgcatatgagtgagtgtttttcctgcataaacatgtgtgtgtcctacctgtgtgtggtgctcctgcaagccacaatatagaattacatcctctggaacttgagttacagccaattgtgaactgtcaagtaggtactgggagctgaagtctggtcttttgaaagagctatttaccactgagctccctctctagcccaagatctgctagagatttttaagagaatactttaaaatatgaacaaaaagtattgtttttgattagttatatttctgaaagagctatcttacatcttgtgagactgagacattaaagaaaaggggggaattgagtgaaagttgggaacattcctgaaaaaaaattacaggagctactgtacctatactttctttaggtatttgtaaaggttattccactggcacagtgagaaataaaggctatagcatctagtggtccagatcttgtaatggggtgtaacatgggcttacatgaaattagcttacatctagctacttcagaagatacacatttctagagacaaagaggaactagagtcaacttgataagaatttcatcccacattccactccatcaaactgaatcatagaaaaggatgagaccgcgtgtagctggtggctgtatgaacaaggaataggtgaacccgatgggagataaacagagggattaatgtttctgcatcaaaacacagaatttaggagagccaacactacagccagctagtgtaaactggagagtgtggatatatctttcattcacaagccaaataatttcttcatatcttaaggtaacttgctcatagggtagggagggcaggagtctgggctgggcataaagggaagagcagggcccgctgtgcctgcacttacttctggcacagatgtgtttactagcaacctcagctgaaacactatggtggagctcactgcagaggagaaggcagccatcactgccacgtggactaaggtgaaggcagaagaacttggtgttgagtccctggaaaggtcagtatccgacagcctaagggagcaagtggaaggaggtatgtggaggcactgaatttctctgtcctcatgcttcacttgctagaatactgacggtttatccacacaccaagagatactttgaccactttggagacttctccttctgtgctgccactgaagataaccacaagctgaaggctcttggtaagaagatgatagaatcctttagtgaggacctgcaatccctggacaacctgcactacacctttgccagcctgagtgagctgcaccatgacaagcttcatatggatcctgagaacttcaaggtgagttggctagatgtgctgccttctgctcacgctcttgatttctacttactgctgcatcccccaccttctctttcatttgcctacacttaatcgtctaatgattttcaacttttgttcaatatccttcttaatttacccctttcacaatcttcaattaaagaaatgtatttattttatatcctgtcttttgtgctccacccacagctctacctacatttatcctcaagtcccttgcttagaccacaagtcaaatgacacattctgtttttcattttctaattctagatttggggaaacattcttccatctccccctaatataggaggctttatgagtcttctcaaggaagagaaacagaacatctggttttaaagacatgagaaaaagaataatcagaattccatgaaattagtaaaggttaagatgaggaaaaaatatgtggatggaaggaaggtctgaacatcttgttagagttggaacaatagtggtaaagagagagcctatcatcagattaatcaactgattattaagcatacacttaggatataagtatatgcatagataaaatatatgtacatatacttatatacacaaacacacatgtatatttacttttttattttggaagaaattatctaggaatcaaactgggatagaatgttggcagaaactcatggtgtttggtatggctcttcagaagccaagattaatttccctatcatatgcatgtctgtcttcctctttcccaaagctcctgggcagcatgatagtgattgtgatgtctccacactttggcaacagctttacttcagcactgcaagctgcttttgagaaggtggtggctgctgttgcagatgctatggcttacaagtattactgagaccccttctttcgcatggtcattggaagatccttctctagaatcctgtgttttgaagtttgtattttttgggggggggtgtccatcctcatggcatagaatctgcttaataaataatttcatgacttatttcattcatttttcccacttagggatgtgcaacacaatagaagatctacaaggaaaaagctgctctgtatttatgcaaatagttggaagaaaactctatagagatactaaaggaaggcaaaagataggatttgaaaattgaaactgaagaagaacgaagaccaaagtgtggacactttgccccttcttagaattggaaacaatcatccatggaaggagttacagagacaaagtttggagctgagacaaaaggatggaccatctagagactgccatatccagggatccatcccataattagcctccaaatgatgacaccattgcatacactagcaagcgtttgttgcaaggaccgtgatatagctgtctcttgtgagactaggccggggcctagcaaacacataagtggatgctcacagtcagctattggatggatcacagggcccccaatggaggagctagagaaagtatccaaggagctaaagagatctgcaaccctgtaggtgcaacattatgaactaaccagtaccccggagctcttgtctctagctgcacatgtatcaaaagatagcctagtcggccatcactggaaagagaggcccattggacttgcaaactttatattccccagtacagaggaacactagggccaaaaaatgggaatgggtggataggggagtgtgtgtgtgtgtgtgggggagggtgtgggggacttttgggatagcattggaaatgtaattgaagaaaatacataataaaaaatattaaaaaataaccataggatttgtcataagtgtttcatatagagagggtcttacccttttagaagatttatgagaaacttccaactgggtaaaaggctcaaggctggctactgttatgatccaacaattaccatgcatagatagcaccaatctaatgcataatgactatcgaaagcattgccatgattcttcctttatctgtagactttagcttatactataacataacaagccatatatatataccttctttgtcttactagctcccaaataccaatttaaaatttagctcttgaattatgttggcccctcattcaatgaactaatacttcctaaagaaatcattgtgaacattctcactctaccaacttttcaaattgctcttttaatcacacatacactcccacacatgcactcttctatacatgaacacatggtcatgctttacaaatttctgctttgtgggagagatttatactgcaatctttcttgctattaaattgtattttgcaattaaattactatataggtagtaagctgacattaattcaatgaaataatcatggacaatatatctgaaacacctatggctggagctaatcagaataattataggatattataaagctctactcataaatgctacaaactacaggaaggaaaaaggaagaaaccacagaattctgatcatgtgtagaaaaatttctttctttgaatgctctttctgctatatgtgaaattagcaagatttttaaaaatttctgactcacatgtgttccttaaaattatgttctgattggctgcttttagatgtacttgttattcagaacctggctcctctttctttgtgaagtcacccagtctcctaaagaaaacacacacacacacacacacacacacacacacacacacacacacacacacacacacacacacacaccctcatatatggattcatatatatggtatatatatgtgaaaatactgttgtagtaaatctgcctatactgcaggatatactgaccacattatactgcactgttggtagcaagcctgagtccagaggctgtttcgtgttcaatctgtccttctcagtgtatagcttataacagacaatgagaatgctttgtagatagaaagtatcttctagatctcccagatgcagggcaactgcagagccatttcacatagcccatatttctgaacagataaaaatcacaagagtgagatgttaaagaaggatggaatttagggggatgtttttcttttaggaatatatagtgtatagaggtcatgtcatcacagctccttattcctaccctggaagagaagttttaccatgtttatgggcaacaacataacctgctaggttccactttattatttccatatttccctcataggaccattatttattagtttctatagtatataaatttgttgtttttttcctcctgtttcagaatactgacttggttattttaacatataaaatactttttccacaatatttttctgtgacaggtcatttggatatagaatagtaacttcatccttagagagaatgatcatgatatagccatgtcctactcttatgaatccctactgttaattttcttcttagaaagtaatattaaaaatatttgattgatttactttttttcattttccatatttgttatctcctagtttatgagcctagaagaaaaatttaattttgtttttcatttcataaatccctagggctaaaccattatgatacagttactcaacaaatagttgttcaatgaatgtttgttacaatatgaaactgtaatctttattacagtaatttattactgtaatatatacaattttgttacaatatgaaactgtagtctttaatggctgagccaggggggaagaaactgggtgagagagggagtaaggaaggaataggaatggggatcaggtctggggaataagagtgaggtggagtgaggtggggagggctgggagagggaacagaaatcagtggggtcatctttggaactagccagagacctaggaaaggggagggttccagaagtctagggggttggttaccctagctgagactcctagcaactgaggatatggagactgaagtgactgcctcctgtaaccaggcatgacttccagtggaggaggcaggcatcaacctttccacaaaacctttaccccaaatttgtcctttctacaagatgtgcagggataaatatggagcaaagactgagggaatggccaaccaatgactggcccaatttcagacccatcctgtaggagagagtcaacccctgacactattgatgatattctgctatgcttacagacaggaacctagtataactgtcttcagagagccttcatccaacagttgatggaaatagatacagatatccacagtcaaatatcaggcagagctcaggaagtggtgcagaagagtgagggagaggattgagagagccaaaggggtgaggacaccacaagaagacctactgagtcaacaaaactggggctatgagggttcacagagactgacccaccaactaaaaagcatgcatggattggacctaggctccctatacatttgcagcagatgtgcagtttggtctccatgtaggtcccctaacacttgtaaaagaagctgtttctgactctgttgcctgcctttgaatccctttcctctagctggactacctggaatgggccccagtgggaaagcatggatttagtactggtgcaatctgctgtcccagggtgtgtggcacctaagtgggagttttcccttctctgaggagaatggaagggggtaatgggaggaaggatttgagagggtgggactgggaggagaggagggagcagggaccatgatctggatgcgaagtgaataaataaattttaaaaagagagaaaaccccagaaactgcttgtaggtgagcattcaggtatgagcaatggcatgtggaaaatggatggtacatttatagacatgtagcaattaatttatctttggaagaaatagccccaaaagcctaaggagagagaaattattaaaaataactcctagattgctagtaaggtgatgactttaattttcctgcacctaagaccatatatatcctagatgtccaacgagacagaaaaggcttactatttaagatttttggaagtttagatactggacatcaaggtatcctaccaggtcagatctccaactttgaaaccaattggatatttgactatgctgaaagagttgtatgcagtactattggctcacaaatattctttattgaaggagaatctagatggcattttctcaatctctacattctgtccctctacaccaattaaaaaaatcctctctatatccatttctatataaaagatataaaaatcattgcagctataaataaaatattactaagtagatataaaaagctctcctatttggccatatggctattcccatttgtgtgcatatatgagctttgctagagatgaaggcaatcaaaatgattcatcttcatttttttaatttcatgccatccctagtttgtacactaagatagttatattaatttacttgagtatacatatttagaaacagctacattccctttattacttgagagagtcatacatccatagcaatggtttgatcaaatccacccttcagtctttcccattcaagtcttcccttattcacctgccccctttccttcccaacttcatatggcttatatttaagcccagtcatttgccttgtcattcatggcaaataccattttgctgtagatgtccactacttctggctcttaaaatatttcacacttttctcttccaaaattatccttgagccttggaagaaggaggtgtgatataggtattccattaagagctgccacaatctttctctgcggattgaccagttttgtttctcaatttattggtatctgtacaaaggaaggagcttctctaatgagagttgaaagatgttttattctatgtatataggggtaagtacttaggcagaaatttacttttatgcttatttaagagaataattatattagtgtttcctttatgacttaggcagcaatgttttgggtccagataactgtaccaggcatgagttctatcttgtgaagcagaccttaaattccatcagaaactggttagttgctctcataacagtcacaccacaattacctatgtgggtacacaaagacaatgacaatatatgctaacgtagatagggaaaagcccattgggcctcagcccctccaacaaagaacaacgggcaactaaagagtgtgagagctagagaaatagtcttccccagagaagagcacaccaagccttcagacttgaaaacatacatgcaagtaacattacatggaagtcaggtagtccgggatgggcattaaaggtagagcagtgcctgctgtgcctgcatctgcttctgacacaggttgttcactagcagcagtcctacaccagggtgtactgactgacaaagagaagttggccatcagtggcctgtgggacatggtagacatgggaaacattgatggcgagtcactggagaagtcgtaatgggctgcataagcaggacacatggaagcttggtaggtgaagagagagcagaatgtctggcaggaactgattttctctacccacctgaaacacctggccatcctcaagggcatcttttctggcatgaatgaagctgcactgtgacaagctgcatgtagatcctgagaacttcagggtgagtgggccagatgctctggcttcggcttctgctcgttttgtcacttctttttccatttgcctttttccccacagtttcctctactgttctgtatttcttcacttaacactcttctttggctaactttccttcacaagtcaacttcctcccttccccccccataatcttctttaacaaatcttttcctccttcttcctctctctctcccccaattcccttccttcattcatcttcaaatccccttggtaggatcacctcctgagttatacatactatctctcatctactatatctacatctggaaaacatccttcttactgctaccattgcttgagcttttgagagtctccttaatgaagaggcacgtgtggttctagagtctttgaatcattctttaaataataagaatttcatgaatttaggcaaagatttagtgcaaagataaggaaagaatagttaatgtctaaggatggaagacctgaaattcatattagagatggggtaacagtagatggtaaaaaggagcccaccatcgaactaatcaattaagtagtaaatataaatattatataaaaaatacatttatataaagacacacattttagaagaaatatcctggaaattcatagtgttggtgcaattccttaaaagactagcttgatttctgatacccaggggtaaatgtgtgtgctcttctccacagttcttgggaaacataatagcatttgtgctgttcctccattttggcaaggaattcaccccagcagtgcaggttgcttttcaggtgttggtggcttctgtaaccatggatctagctcacaagtaccacagaggccttggactatttcctcaagattactggagcataatcttctatattcagggagatatgtccacctttgcaacttttccccaagaaaaagttagttaaatttcatttcctttatgttgttgttttgttttgttttctttccccctagggatgagaaaagtctcagagagcctctaagtaggaagcttttatataatatacaaatcttaaaggaaataattaaacctcatcactactagggttttagtgaaggctgggtattaaaattgcaccagtaaatgtaattcataaaattatatattatgtgtaacaataaatatgcatatgtaattcttacctgaactggagaaagctgtaaaagaacttagtattttctacatgaccaagaaaaatctaagttttgattgtgtgcatccactgaggagttgggacaggtaaaatgagaagagaaatcttctctcaatggaggaggggctacttggagaagaggcattaaaaattgtgtaaatctcctaatttgcttggtaactgaatgagagaaaggcagtttttatttatatatttatttttatttcattttaattcagattgtggctcctagaggtttgcctgtgctccagtggttgatcttatatctatgcttatatgaggagtactagctgaactttatgggtcaaaaaaagaggctataaagtaaggatcaggtaggagtttctgggaaaacttgggaagtgggttgagagagtgaatatgatcaaaatacattgtatacaggcatgtgattataaagaatgaaaaaatatatcttaaaatttgaaaaacatggctggattataatgtttgagtattcggaagggacatcatgtgctaatactattgaatatttgttgcttgtgatgaccaaggggaagaaagatgtttctgaatagtgggacacatagataaagtagaaaaacactataatagagtagtatcacactgttctcagtttaggcaggggatgaagatcccaaaaccttgatgataaataaaagcgagtgaagacttagcagggagcttgagagtactgggatgccacactgcatcagaaatatctcttctctttacattcaagtcttcaacatcaagaaaccaagttacagaagttcttaacctgagaactgaaaagtatattacttgggggaaaaagccagaaagcaaaaaggttttagaagagttacagagatgtaaaagtaaaattttacaaagaagacagattgaatgaagaagcatgcagggaacttgagagtggggtatcttagcatttctattatgtggtaaaacatcagggtcaaaaccattagggaggaaaacatttactcatcacagtcctctcaagtcttactccatggagtgtgtgtgggtgggggggcggggaagagggatgtcaggacaagacttcaggtcatgaacctggaggcaggaactaaagcagaggcacggaggaacactgctcactggattgttcctcatggctttctcggtctgctttcttaacgcaccatgaagcacctgatgaggggtggcaccatcctctatgggctgctcaccagcatcagctattaatcaagaaaataccctacaggtttgcctacaagtaatctgatggaggtttcttttcctttcctttcctttcctttcctttcctttcctttcctttcctttcctttcctttcctttcctttcctttcctttcctttcctttcctttcctttcctttccttcctttcctttcctttcctttcctttcctttcctttcctttcctttcctttcctttcctttcctttcctttcctttcctttcctttcctttcctttcctttccttcccttcccttcctttccttttcctttccttttctcctcttttcttttttgttttattaactctttctcaacagattttattggtctaagagcagagtacacagacattaccattcttatcacacatacccataaagagccatatattgtgttcatgtacccaaattctgaagagtcacactgtgttcacatgcacaaatgaagatctacatattgttcttctttgaatttattccagtgatgttccagcctcaaatttggcaagtgtccctaagacctctcataacaaccgaatgttcataatacccccttccaccaactcacaattttatgtcacacacaggacatactgaaaatttccatctttcacatcacattatcacaactgttaggaaagtggaatgccatgaccagacatcacagttctgacaggcaaggaccaaagactggctctcttagaaaatggttctactagaaacatgggaccagatataactgaaaatattccagtcacaaatgcacaactgagactccagattgccatttagtatgctttgtattgtagaatataaaactagccccctctacggaatgttatcgtgacccccgaggcagtcacagcctctcctgactcggtatcctgctattttctggttgtaccaaaaaataaacaaccggtaaatgacttaacctcttaaaaaatatttatacttaaataatgagatgagtttggatttcctcaccttttaaaaatgttgctagagctactaaaaagcttgcatttacaagtagttgataaaaatattcctctggattgtgcaagaagggaggcaggaccactgacagacatgatggatgcttagtcggacttggcttctttctctttttcagaggctgcactctggttttctgtctctccattttctgcaggcagttctctagtttgctggtcagccacttcagcctgtttgcccttctctcccctcttcccttttatctgcactttttttgtctgatgctttattctttcctgcagcccctttgggcttcctgtcattgatggggcaggcttggctaatcgccttgcagaatggtgcttggggtatgccttcactgctcca

SEQ ID NO: 518 - DNA, 25525 bp, Mus musculus
tggagcagtgaaggcataccccaagcaccattctgcaaggcgattagccaagcctgccccatcaatgacaggaagcccaaaggggctgcaggaaagaataaagcatcagacaaaaaaagtgcagataaaagggaagaggggagagaagggcaaacaggctgaagtggctgaccagcaaactagagaactgcctgcagaaaatggagagacagaaaaccagagtgcagcctctgaaaaagagaaagaagccaagtccgactaagcatccatcatgtctgtcagtggtcctgcctcccttcttgcacaatccagaggaatatttttatcaactacttgtaaatgcaagctttttagtagctctagcaacatttttaaaaggtgaggaaatccaaactcatctcattatttaagtataaatattttttaagaggttaagtcatttaccggttgtttattttttggtacaaccagaaaatagcaggataccgagtcaggagaggctgtgactgcctcgggggtcacgataacattccgtagagggggctagttttatattctacaatacaaagcatactaaatggcaatctggagtctcagttgtgcatttgtgactggaatattttcagttatatctggtcccatgtttctagtagaaccattttctaagagagccagtctttggtccttgcctgtcagaactgtgatgtctggtcatggcattccactttcctaacagttgtgataatgtgatgtgaaagatggaaattttcagtatgtcctgtgtgtgacataaaattgtgagttggtggaagggggtattatgaacattcggttgttatgagaggtcttagggacacttgccaaatttgaggctggaacatcactggaataaattcaaagaagaacaatatgtagatcttcatttgtgcatgtgaacacagtgtgactcttcagaatttgggtacatgaacacaatatatggctctttatgggtatgtgtgataagaatggtaatgtctgtgtactctgctcttagaccaataaaatctgttgagaaagagttaataaaacaaaaaagaaaagaggagaaaaggaaaggaaaaggaaaggaagggaagggaaggaaaggaaaggaaaggaaaggaaaggaaaggaaaggaaaggaaaggaaaggaaaggaaaggaaaggaaaggaaaggaaaggaaaggaaaggaaaggaaaggaaggaaaggaaaggaaaggaaaggaaaggaaaggaaaggaaaggaaaggaaaggaaaggaaaggaaaggaaaggaaaggaaaggaaaggaaaggaaaggaaaggaaaagaaacctccatcagattacttgtaggcaaacctgtagggtattttcttgattaatagctgatgctggtgagcagcccatagaggatggtgccacccctcatcaggtgcttcatggtgcgttaagaaagcagaccgagaaagccatgaggaacaatccagtgagcagtgttcctccgtgcctctgctttagttcctgcctccaggttcatgacctgaagtcttgtcctgacatccctcttccccgcccccccacccacacacactccatggagtaagacttgagaggactgtgatgagtaaatgttttcctccctaatggttttgaccctgatgttttaccacataatagaaatgctaagataccccactctcaagttccctgcatgcttcttcattcaatctgtcttctttgtaaaattttacttttacatctctgtaactcttctaaaacctttttgctttctggctttttcccccaagtaatatacttttcagttctcaggttaagaacttctgtaacttggtttcttgatgttgaagacttgaatgtaaagagaagagatatttctgatgcagtgtggcatcccagtactctcaagctccctgctaagtcttcactcgcttttatttatcatcaaggttttgggatcttcatcccctgcctaaactgagaacagtgtgatactactctattatagtgtttttctactttatctatgtgtcccactattcagaaacatctttcttccccttggtcatcacaagcaacaaatattcaatagtattagcacatgatgtcccttccgaatactcaaacattataatccagccatgtttttcaaattttaagatatattttttcattctttataatcacatgcctgtatacaatgtattttgatcatattcactctctcaacccacttcccaagttttcccagaaactcctacctgatccttactttatagcctctttttttgacccataaagttcagctagtactcctcatataagcatagatataagatcaaccactggagcacaggcaaacctctaggagccacaatctgaattaaaatgaaataaaaataaatatataaataaaaactgcctttctctcattcagttaccaagcaaattaggagatttacacaatttttaatgcctcttctccaagtagcccctcctccattgagagaagatttctcttctcattttacctgtcccaactcctcagtggatgcacacaatcaaaacttagatttttcttggtcatgtagaaaatactaagttcttttacagctttctccagttcaggtaagaattacatatgcatatttattgttacacataatatataattttatgaattacatttactggtgcaattttaatacccagccttcactaaaaccctagtagtgatgaggtttaattatttcctttaagatttgtatattatataaaagcttcctacttagaggctctctgagacttttctcatccctagggggaaagaaaacaaaacaaaacaacaacataaaggaaatgaaatttaactaactttttcttggggaaaagttgcaaaggtggacatatctccctgaatatagaagattatgctccagtaatcttgaggaaatagtccaaggcctctgtggtacttgtgagctagatccatggttacagaagccaccaacacctgaaaagcaacctgcactgctggggtgaattccttgccaaaatggaggaacagcacaaatgctattatgtttcccaagaactgtggagaagagcacacacatttacccctgggtatcagaaatcaagctagtcttttaaggaattgcaccaacactatgaatttccaggatatttcttctaaaatgtgtgtctttatataaatgtattttttatataatatttatatttactacttaattgattagttcgatggtgggctcctttttaccatctactgttaccccatctctaatatgaatttcaggtcttccatccttagacattaactattctttccttatctttgcactaaatctttgcctaaattcatgaaattcttattatttaaagaatgattcaaagactctagaaccacacgtgcctcttcattaaggagactctcaaaagctcaagcaatggtagcagtaagaaggatgttttccagatgtagatatagtagatgagagatagtatgtataactcaggaggtgatcctaccaaggggatttgaagatgaatgaaggaagggaattgggggagagagagaggaagaaggaggaaaagatttgttaaagaagattatggggggggaagggaggaagttgacttgtgaaggaaagttagccaaagaagagtgttaagtgaagaaatacagaacagtagaggaaactgtggggaaaaaggcaaatggaaaaagaagtgacaaaacgagcagaagccgaagccagagcatctggcccactcaccctgaagttctcaggatctacatgcagcttgtcacagtgcagcttcattcatgccagaaaagatgcccttgaggatggccaggtgtttcaggtgggtagagaaaatcagttcctgccagacattctgctctctcttcacctaccaagcttccatgtgtcctgcttatgcagcccattacgacttctccagtgactcgccatcaatgtttcccatgtctaccatgtcccacaggccactgatggccaacttctctttgtcagtcagtacaccctggtgtaggactgctgctagtgaacaacctgtgtcagaagcagatgcaggcacagcaggcactgctctacctttaatgcccatcccggactacctgacttccatgtaatgttacttgcatgtatgttttcaagtctgaaggcttggtgtgctcttctctggggaagactatttctctagctctcacactctttagttgcccgttgttctttgttggaggggctgaggcccaatgggcttttccctatctacgttagcatatattgtcattgtctttgtgtacccacataggtaattgtggtgtgactgttatgagagcaactaaccagtttctgatggaatttaaggtctgcttcacaagatagaactcatgcctggtacagttatctggacccaaaacattgctgcctaagtcataaaggaaacactaatataattattctcttaaataagcataaaagtaaatttctgcctaagtacttacccctatatacatagaataaaacatctttcaactctcattagagaagctccttcctttgtacagataccaataaattgagaaacaaaactggtcaatccgcagagaaagattgtggcagctcttaatggaatacctatatcacacctccttcttccaaggctcaaggataattttggaagagaaaagtgtgaaatattttaagagccagaagtagtggacatctacagcaaaatggtatttgccatgaatgacaaggcaaatgactgggcttaaatataagccatatgaagttgggaaggaaagggggcaggtgaataagggaagacttgaatgggaaagactgaagggtggatttgatcaaaccattgctatggatgtatgactctctcaagtaataaagggaatgtagctgtttctaaatatgtatactcaagtaaattaatataactatcttagtgtacaaactagggatggcatgaaattaaaaaaatgaagatgaatcattttgattgccttcatctctagcaaagctcatatatgcacacaaatgggaatagccatatggccaaataggagagctttttatatctacttagtaatattttatttatagctgcaatgatttttatatcttttatatagaaatggatatagagaggatttttttaattggtgtagagggacagaatgtagagattgagaaaatgccatctagattctccttcaataaagaatatttgtgagccaatagtactgcatacaactctttcagcatagtcaaatatccaattggtttcaaagttggagatctgacctggtaggataccttgatgtccagtatctaaacttccaaaaatcttaaatagtaagccttttctgtctcgttggacatctaggatatatatggtcttaggtgcaggaaaattaaagtcatcaccttactagcaatctaggagttatttttaataatttctctctccttaggcttttggggctatttcttccaaagataaattaattgctacatgtctataaatgtaccatccattttccacatgccattgctcatacctgaatgctcacctacaagcagtttctggggttttctctctttttaaaatttatttattcacttcgcatccagatcatggtccctgctccctcctctcctcccagtcccaccctctcaaatccttcctcccattacccccttccattctcctcagagaagggaaaactcccacttaggtgccacacaccctgggacagcagattgcaccagtactaaatccatgctttcccactggggcccattccaggtagtccagctagaggaaagggattcaaaggcaggcaacagagtcagaaacagcttcttttacaagtgttaggggacctacatggagaccaaactgcacatctgctgcaaatgtatagggagcctaggtccaatccatgcatgctttttagttggtgggtcagtctctgtgaaccctcatagccccagttttgttgactcagtaggtcttcttgtggtgtcctcacccctttggctctctcaatcctctccctcactcttctgcaccacttcctgagctctgcctgatatttgactgtggatatctgtatctatttccatcaactgttggatgaaggctctctgaagacagttatactaggttcctgtctgtaagcatagcagaatatcatcaatagtgtcaggggttgactctctcctacaggatgggtctgaaattgggccagtcattggttggccattccctcagtctttgctccatatttatccctgcacatcttgtagaaaggacaaatttggggtaaaggttttgtggaaaggttgatgcctgcctcctccactggaagtcatgcctggttacaggaggcagtcacttcagtctccatatcctcagttgctaggagtctcagctagggtaaccaaccccctagacttctggaaccctcccctttcctaggtctctggctagttccaaagatgaccccactgatttctgttccctctcccagccctccccacctcactccacctcactcttattccccagacctgatccccattcctattccttccttactccctctctcacccagtttcttcccccctggctcagccattaaagactacagtttcatattgtaacaaaattgtatatattacagtaataaattactgtaataaagattacagtttcatattgtaacaaacattcattgaacaactatttgttgagtaactgtatcataatggtttagccctagggatttatgaaatgaaaaacaaaattaaatttttcttctaggctcataaactaggagataacaaatatggaaaatgaaaaaaagtaaatcaatcaaatatttttaatattactttctaagaagaaaattaacagtagggattcataagagtaggacatggctatatcatgatcattctctctaaggatgaagttactattctatatccaaatgacctgtcacagaaaaatattgtggaaaaagtattttatatgttaaaataaccaagtcagtattctgaaacaggaggaaaaaaacaacaaatttatatactatagaaactaataaataatggtcctatgagggaaatatggaaataataaagtggaacctagcaggttatgttgttgcccataaacatggtaaaacttctcttccagggtaggaataaggagctgtgatgacatgacctctatacactatatattcctaaaagaaaaacatccccctaaattccatccttctttaacatctcactcttgtgatttttatctgttcagaaatatgggctatgtgaaatggctctgcagttgccctgcatctgggagatctagaagatactttctatctacaaagcattctcattgtctgttataagctatacactgagaaggacagattgaacacgaaacagcctctggactcaggcttgctaccaacagtgcagtataatgtggtcagtatatcctgcagtataggcagatttactacaacagtattttcacatatatataccatatatatgaatccatatatgagggtgtgtgtgtgtgtgtgtgtgtgtgtgtgtgtgtgtgtgtgtgtgtgtgtgtgtgtgtgtgtgtgttttctttaggagactgggtgacttcacaaagaaagaggagccaggttctgaataacaagtacatctaaaagcagccaatcagaacataattttaaggaacacatgtgagtcagaaatttttaaaaatcttgctaatttcacatatagcagaaagagcattcaaagaaagaaatttttctacacatgatcagaattctgtggtttcttcctttttccttcctgtagtttgtagcatttatgagtagagctttataatatcctataattattctgattagctccagccataggtgtttcagatatattgtccatgattatttcattgaattaatgtcagcttactacctatatagtaatttaattgcaaaatacaatttaatagcaagaaagattgcagtataaatctctcccacaaagcagaaatttgtaaagcatgaccatgtgttcatgtatagaagagtgcatgtgtgggagtgtatgtgtgattaaaagagcaatttgaaaagttggtagagtgagaatgttcacaatgatttctttaggaagtattagttcattgaatgaggggccaacataattcaagagctaaattttaaattggtatttgggagctagtaagacaaagaaggtatatatatatggcttgttatgttatagtataagctaaagtctacagataaaggaagaatcatggcaatgctttcgatagtcattatgcattagattggtgctatctatgcatggtaattgttggatcataacagtagccagccttgagccttttacccagttggaagtttctcataaatcttctaaaagggtaagaccctctctatatgaaacacttatgacaaatcctatggttattttttaatattttttattatgtattttcttcaattacatttccaatgctatcccaaaagtcccccacaccctcccccacacacacacacacactcccctatccacccattcccattttttggccctagtgttcctctgtactggggaatataaagtttgcaagtccaatgggcctctctttccagtgatggccgactaggctatcttttgatacatgtgcagctagagacaagagctccggggtactggttagttcataatgttgcacctacagggttgcagatctctttagctccttggatactttctctagctcctccattgggggccctgtgatccatccaatagctgactgtgagcatccacttatgtgtttgctaggccccggcctagtctcacaagagacagctatatcacggtccttgcaacaaacgcttgctagtgtatgcaatggtgtcatcatttggaggctaattatgggatggatccctggatatggcagtctctagatggtccatccttttgtctcagctccaaactttgtctctgtaactccttccatggatgattgtttccaattctaagaaggggcaaagtgtccacactttggtcttcgttcttcttcagtttcaattttcaaatcctatcttttgccttcctttagtatctctatagagttttcttccaactatttgcataaatacagagcagctttttccttgtagatcttctattgtgttgcacatccctaagtgggaaaaatgaatgaaataagtcatgaaattatttattaagcagattctatgccatgaggatggacacccccccccaaaaaatacaaacttcaaaacacaggattctagagaaggatcttccaatgaccatgcgaaagaaggggtctcagtaatacttgtaagccatagcatctgcaacagcagccaccaccttctcaaaagcagcttgcagtgctgaagtaaagctgttgccaaagtgtggagacatcacaatcactatcatgctgcccaggagctttgggaaagaggaagacagacatgcatatgatagggaaattaatcttggcttctgaagagccataccaaacaccatgagtttctgccaacattctatcccagtttgattcctagataatttcttccaaaataaaaaagtaaatatacatgtgtgtttgtgtatataagtatatgtacatatattttatctatgcatatacttatatcctaagtgtatgcttaataatcagttgattaatctgatgataggctctctctttaccactattgttccaactctaacaagatgttcagaccttccttccatccacatattttttcctcatcttaacctttactaatttcatggaattctgattattctttttctcatgtctttaaaaccagatgttctgtttctcttccttgagaagactcataaagcctcctatattagggggagatggaagaatgtttccccaaatctagaattagaaaatgaaaaacagaatgtgtcatttgacttgtggtctaagcaagggacttgaggataaatgtaggtagagctgtgggtggagcacaaaagacaggatataaaataaatacatttctttaattgaagattgtgaaaggggtaaattaagaaggatattgaacaaaagttgaaaatcattagacgattaagtgtaggcaaatgaaagagaaggtgggggatgcagcagtaagtagaaatcaagagcgtgagcagaaggcagcacatctagccaactcaccttgaagttctcaggatccatatgaagcttgtcatggtgcagctcactcaggctggcaaaggtgtagtgcaggttgtccagggattgcaggtcctcactaaaggattctatcatcttcttaccaagagccttcagcttgtggttatcttcagtggcagcacagaaggagaagtctccaaagtggtcaaagtatctcttggtgtgtggataaaccgtcagtattctagcaagtgaagcatgaggacagagaaattcagtgcctccacatacctccttccacttgctcccttaggctgtcggatactgacctttccagggactcaacaccaagttcttctgccttcaccttagtccacgtggcagtgatggctgccttctcctctgcagtgagctccaccatagtgtttcagctgaggttgctagtaaacacatctgtgccagaagtaagtgcaggcacagcgggccctgctcttccctttatgcccagcccagactcctgccctccctaccctatgagcaagttaccttaagatatgaagaaattatttggcttgtgaatgaaagatatatccacactctccagtttacactagctggctgtagtgttggctctcctaaattctgtgttttgatgcagaaacattaatccctctgtttatctcccatcgggttcacctattccttgttcatacagccaccagctacacgcggtctcatccttttctatgattcagtttgatggagtggaatgtgggatgaaattcttatcaagttgactctagttcctctttgtctctagaaatgtgtatcttctgaagtagctagatgtaagctaatttcatgtaagcccatgttacaccccattacaagatctggaccactagatgctatagcctttatttctcactgtgccagtggaataacctttacaaatacctaaagaaagtataggtacagtagctcctgtaattttttttcaggaatgttcccaactttcactcaattccccccttttctttaatgtctcagtctcacaagatgtaagatagctctttcagaaatataactaatcaaaaacaatactttttgttcatattttaaagtattctcttaaaaatctctagcagatcttgggctagagagggagctcagtggtaaatagctctttcaaaagaccagacttcagctcccagtacctacttgacagttcacaattggctgtaactcaagttccagaggatgtaattctatattgtggcttgcaggagcaccacacacaggtaggacacacacatgtttatgcaggaaaaacactcactcatatgcaaaaagtgaaacttaaaaaagaaatagcacatctcaccagtcttctttacctcctggcacctgcaaccctactttttaccttgcacagtaaatattttgtaccctatcttatactgaacagaccctttcatctcttcctggagaaaactttctcatctttaacttagctctttccctaatacttcactctatctggtttcttcttctgtcttttcccaccaacaagcccattgagatctttcttcaacataaaagtaaaaacaaacaaaaaaaaaacaaaaagtcaatgttattaagaatcaattttattaaacaaaatttgtgctctcaatgcagtccccatggactcaaagagggcatcatagacacatgggattgccagtgtactggaatggagtttaatggtacttgtgggacagagcattggccactccaatcaccagcttctgccaggcagcctgcacctctggggtgaattccttggcaaaatgagtagaaaggacaatcaccaacatgttgcccaggagctgtaacaaaaaggcacataggaatgatcagtagtttcaaatctgtgacgtgtaaaagttacgttccttgaggattccagtccctcactacctatcacttctcctgttatgcatttgacaactgaattacatgactcctcttgtacaccactcaactggctatatctgtacctttcctcattctgccctttttatctcctcccattttttgctccctgtctcattcatcaatggtcaaatctaaatcaacacatgactgcgatacaagattcttagtagatttgagtgttcaaccaaagagaaggctcaaactgtgccaatgctcagtgggaaagtaaaacatttagaaagttgtcaaaataataagaaaaaaaaaccctatattttgatttcctcctcgagtcttccataaaggattggacattaagattgacacaattaattaaggtatttttcctttcaaatgataagatattaacttaaattcagtttcttcttgcatagatgtattaatttataaaaacatactccttttttaaaaaattccaatatttgaatgcttagtttccaatgctcagaatcaaacccaaggccccagaaatgctgggagctcactcaaatctgcacccaaatcattgttgcccagaacatatgcacagctaaatattaagatttctacaacggttactgacaagaattctggacccatggactctaacctctgtcaaggcattgccaagcacagtctcaactccaagtattgtccctagtaaaatccataatgaacacatgagcatgctcagaactgaccttgaagttctcaggatccacatgaagcttgtcacagtgcagctcactgagatgagcaaaggtctccttgaggttgtccatgttcttaacccccaagcccaaggatgtcagcactttcttgccatgggctctaatccgggggtttcccatgatggccagggcagaagagaggtttccaaacttgtcaaagaatctctgagtccatgggtaaacaatcaggagcctaagacatagggcattagcagttaaaagttagtgtgccacaaaaccctatagaaaccctggaaatttctgccatgcacaaggacaatttccctccattccttaccttcccagagtttctcctccaactttttccaagtccactttatcccagatgcttgtgatagctgccttctcctcagctgtgaagtgaaccatggtgtgaggtatagaagcttggagatgatctcaagtgtgcaaaagcaagtgtattcaagaggctgaagacctgtccttttattcttcaccctggaccttgctccccttacccctccccaggactctgaggctattggtcaagagagtctgggcaagacaggggtggggtccagtggggtaagttctagatagcaatgcactaagatagtgtccagtaggccccctgcctcggagagacagagcctcctgctgcagctttcccagagttcaccgtctttctttccttctttccttctctttagctccttcccccaacaggagatttgcaagggtgtctttcacattcttccctttttcacttcagacttagagggattaatacatttaagttgaagcataggcaaacatgggaacgcctcagtgagccagaggctatttttaggaatggggttacgaacctaagtgatagaaatatgagtcttactcacaagccacgtataagaaagatgtggtgtgcaaaaccattgaatgcattttcagtaggcttaggacatgatcttcttatttcccacagccccaggaaagccattcctaatacatttcagtttctaagtaaaaatatatatatatacacacacacacacacacacatatttataacacacacacacacacacatatatatatatatatgtattactgtgtagaagtacaacatgtctccacattccatcatacactaaagtagagaagtctgtgtacatgacagcattttccacccattgaatgcacagtgttgacaccatacaattggcagcccccacccacccacccaggataagtgtagctgcctggtgaaaagggtgagggtttagccttctctatgatcattactggttaaatactgagaacactaaatgatcaagctttcaggtttcttcaactcagctctgttttcactttttgtgtgtttgtaacctaactgtgaagagacagggtatttccatgcagtaacacatgcactatcacagctaggactggattatacattatgaagttcatccctagcagtgagtttctactgacagcttttaaggttttgtagctattttaacgtagtggtcaatagagatttttatttgcatggctgtaaagaacatgcaatgttaacaagaaccagctatgttctcctcttcttcctcttcttcttcttcttcttcttcttcttcttcttcttcttcttcttcttcttcttcttcttcttcttcttcttcttctccttctccttctccttctccttctccttctccttctccttctccttctccttctccttctccttctccttctccttctccttctccttctccttctccttctccttcttcttcttctccttctccttctccttctccttctccttctccttctccttctccttctccttctccttctccctctccctctttctccccctccccctcccctccccttccccctccccctctccctccccccctctgtttctttcttttcactgataaatcttttttttttacagtctaattgttatctccctccccgtctgccttctgattgttcttcatcccatacctcctcccctatctccaagaagatgcctccccactcccactacaccagacctccccactccctgggacctcaagtctctcaaaggttaggtgcatcttctctcactgaggccagacaaggcagtcctctgctgtatctgtgtcagtgacctcatatcagctggtgtatgctgcctggttggtggctcagtgtgtgagagatctcaggagtctaggtcagttgaaacttcatatagggttgccctcctcatcagcttcttccagcttttccctagttcatccacaggggtccatgacttctgtccattggttaggtgtatgtatctgcatctgactcagcttcatgttggacagccatgctagactttgtctgtaagcacaccataatatcagtaatagtgtcatgccttggagcctccccatgaactggattctaaatagggccagtcactgaacctttttttcctcaggctcttctccattcgtcccacccacccattcctgctgcctctctgtagaattatccttcagtattgggtcagagtttatgactgtgggatggcaacaccatccctacacttgatgccctgtctttccactggaggtggactctacaagttccctcttctcattatagggcatttcatcttaggtccctccctttgaatcctgaaagtttctcagctccccgatctctggtaccttctagagctatgatcttttaaaaggaagtcattcgtgagatggcaaatatgtacatatatattcctttagcttctatctccatgatttaatcttggaggatagttggtagtcctgagtttaagcttccaaatatcttaaccagtaaccctaagttgctcttcagcagagtcttgggggaatttcctacaaagttgtattaattagttcatgtctattaatagaccctccataatccccatgtcatgttagtccaggattttgaaaccgtttctttatgacagctaattcatgtaatctcaaatgttcactcaatcattatttgtctcataactatgtgataattattattattagtcctgggatcttttgtttctcttttattgattttttaaatttacatttcaattgttatcccctttcccatccccccaagccctcctatcctatctcccctccccctgctatgagggtgttcattcacccacccacccattcctgctgcctctctgtagaattatccttcacaagtcctgggatttataatgaatgagagacaagacagaacttttctctagcctcattcactaggagatagaagatacagaaatgagtaagtatatcaaacaaaaaagattttaatatgttattactaggaagaaaattaacaattgggattaacaaggacaggacatggtggtatggaattcagtttctctacataatgaagagttaagtttgttgtgtccagaatgtctagaagtaacatgtcacagaaagatactggaaaatgttgtaatagcaaattcagtgttctgaaggaagagaaaataaatatttctgtgacagtgaagctgataatatccatgatcactaaatataaaaataataaagtggaacatggtgggtgtgttgctgcagtgctcataatctaacagaggaatccatcttccttaataggaatgagaaactataatgacataacctttgaatactactcatttcttatgcactactattctagggtcatagtacttctctcaaataatttttattgcaaatgtatattgactatcataggctgcacagaatagcacatgcctttaatcccagcactcagaagaaggaggcagacacatctctgtgagcttgaggctagcacacagtctacatattaagttctaagccatcgaagctacagaagaggaccttgtcttgagaaataaaacaagcaaaagtcttttatcatcctacctgtatatgtgaatgtgtgtgtgcacatatgaagaactatttttcagttatctctttttttccattggagtggttataggtatatatagccctgaaacatttggcaaatatactttcctcccaccactgcataattgccatcttttatccgctgatttctagagccaaaatattcatgatggcataaggagaaaagtaaatttataaaaaatgggcattgtctcatctcttgacaggtccagagaaaacgagtgtcatatacaacgcctgcatttttgttgctattgtttgtttggtttggtttgttttcctgttaattgccatattgaaatgctgtagaccaaaaaggccaatgttgttgatagcctaaaactacaagaatcattgttctttcatatttaaagtggacaaagacaacttgaaatacaatccaccagtcatactctaaccaatctatggaatcaggatgagggaatatagtttagtagctaaaatgtggttatcttacctctaccacttaaagatcaccagccttgacaagagattgactagggcttgaatttctttgagcacctttaaattctctcaagtgtgttttatccacatgagttttccaagtcaatgtacactttatgtagttatgtccactcagtatttgtgatttcatcttctactatcttctgttttcttctcatatattagagttaatctgacactgtctcccccatcccacctttgaacattacctcaggttgcatgccttgcttcacctcttcattttaaacttttatatctctgtaatggttcctaagcatttaagttaaattggatccttaagaatatttttcttagtaataccatttcttgagtcagaaatcctgagactgcttattctttactaatcaattcagttggtgtcttttgtttagtgctagtggatcttgattccctagcagtccacatgttaggacagtgctctgctctgagcagcaccctcagaccaggtttttattattcattctgaggtagcaactcattgagttctttggttgtccttgaactcaatctgttgctcaggtaactcttgaaactgtgacactttgcttagcctttcaagtagtggagtgataagcatatttcaccaggtaagtgttattgtttaatgcttaataaagtattaatattgagatttttataattaagatccctattgtctacttttgccagtattttatctcttcagcatcttctagttttatacaaatcatcaagatctagttcagtgaccttaaatgacagaactttttggcatttttgtagatgtcctgtgtatgaaattatcatgcccacctgtctggagaagattccatttatattctttccctatcataatcatattgcttattacagtagcacagaaaagcacagtggtcgcatctcttagctttcattcctccttgagacaaggaatgccttcaaaaaacaagtctgaagtggtggtttcattgaaactttttcttatatatttaatgctttctatcaacttgtcccttttctttcatcagttccagaggacatctgatatagtatctgttggagaatgttcatttagcgtgggagagatgatgactccgtgtttgagagcaaatactttcctcagagcacctgaattctcagcatatacagctcgcaaccatctgtaactccagctctagtggaacttgatgcctatagtctcctatactcacgtgcacaaacccaaacacagataaatgcagagatacttgattaagagaaataaatcttttttttttaagtcagctgctgtgtggaacctctaggaagatggtgatgctaggctcctgtctgcaagcataagtgagtatggggtcaaggagtagtgcttgtccatgggatggttctacagttgggcctgttattggttggccattccctcaattcctgttccctctctgtttctacatttcttgtagacagaacaaattggggtcaaatgttttgtggatgggttagtgtccttattcctccactggacttccagtctggctactgtaggtggacttttcagattccatacccccactgctatgagtctcagataaggttacctcccccatgaaccctcaggagcctcccccatctcaggtttatggcacattcttgtaatgttcccccatacctacaacattgccaactgcagatttccattcattctccaggccctttggccccctctcctgtctcctcccacacttaaacctgaacccctcctggaaacgaatgccaacattgaatgcagcttgggactcttatgtaagatagagggactctaagggaataggaactccacagaaagaccaacagagtaactaacctggactgttagggggtctcagagactgtaccaccaatcaaagagcttatacacgctgaacctaggtcccagcacatatgtagcagatgtgtagctcaatcttcttgtggttcccccaacaactggaaaatataagcctgtctgtctctaaagctgttcactgtctgtagaatcaattcccctaagtggatggccttgtctgacctcagtgggaaaagatgtgcctagtcaggaagagagttgatatgccagggttgtgtgtgtgtgggcggggataccctaggaggggatcaaccctttcagaggagaagaggcaggatgtgagaagaaattgtgtgaggggggatggggagggggcaacattggagatgtaaagtgaattaattagtggggaaaaaagaaaataaaaaagtaaaaaaaatcataataaaagtaaattattttttaaaataattaaactgattatctcaggttgagcattagatctgtctaaagtttaacttaattaaatggcacataacacagactgtaggtgatcatttgtcatgcatttcttcaccctctacactaagttttagtgactaccacagaacttttttctccacggcattaaccctttgctttcctacatgagaattatccccaacttctcatctttcctggggctctagaaaaattctgtaacatctactttcctctcctgaattccagcaaagttctaaaagaaactcaagcgtccttctgtctcgctcccttaccatctgcccatcagccttctttctttaaacacaaaagtaagaaacagacacaacaaaatatgactcatgggttactgaaaagaatggactttattaagcagaagccctgctttcagagaccagcacagtggccatgggtatggcagagctgaggggtgtacagaatgctggacatcagggaaagggctcagtggtacttgtgggacagagcagtggccaccccaaccaccaacttctgccaggcagcctgcacctcagctgtgaattccttgccaaagtaagaagaaagaacaatcaccagcatgttacccaggagctatggaaggaaacacaaaaagatatacaaaaatgagaaaaggaaataaagaaaagaatttacaggacaaacagcatttgtaagttagtctccttgaggactccccagcagtctgtccactctaatgaggatgctggttcaatctcattgctcaagggccctcctcgaccccattcggtccttctctacttgttccttacttttcctcagtctgccacttttgtttcttgccccttttctcattcaacaatggcctggcttctacaaatacaggattaccatgtatttactagagtttcctataatgaaggaagcagggactacttatgatattactcattgggattgtaatattttttaggaagttcatcaaaccaatgagaaacatctgtcaagttttctctcgtatttttgctgaagggttagtcattagaatccacataaatagggtatttctccttccctagaacaaaatgtcaatttcaagggctagtctacttacatgtatctgctaccttctaaaataaaacacaaaagtgaggaggattctataaccaactctataagtctgctactttgtgtctttttggtagtgctccagtctcaggattcatataccccagagattcatttcatcaactgacttacataccgagacaccaaatgtctgtctgaaaaacttttctgaacagttgcaaattttaattttaattattttaaaaaataatttacttttattatgattttttttttacttttttattttcttttttccccactaattaattcactttacatctccaatgttgccccctccccatgtttcaaaatcgtgtcattttgccattgtaattgtatgtatgtgtgtgtgtgtgtgtgtatatgtataagttgtagtcttctcctctcatgtagaacactctttgcaatagacaaagaccagtacagaaatccacaaccattcaaacttcagagttgtggagcctaacctcagtggatacatctacacacctaaggatcagggaacacttcagaagaagggcaaaagattgtaagagccaaaagaccatgaagcttgctgtgatacacatttgctaatatgggtggggtaaataaagcccatgagacctcaaccatacacaaagaattacagtcaactaagggttgctgagagctggatcaagagtcttccccggggcagagcacaccaattggttacccaacaaatgcttttttaaagaaagttaattctaaattagctcttggatcttgtaaaagctttttcctaatggtaatgggatgtcacaacctgctgcaaggtatcacttgtcacccttttcttcaccctctacagtaaatgttcatatgttccatacacaatgccttctccactaaatttctttcttctctctgagaattctttctcagctttagactctcactgggcctgtagaagccttccatggcttctacgtttctctcttgagtccctgcaggtttcagataaatgcctgagtcttcctgtgcttccccctttccaaaaacacatcaaatatgtgtctttagcataaaagtagaaagcagacaagacaaaactgaatttttgattaccaggaaggatgatctttattaaacatgatgtgctttcaaggaacagtccagtattcatgtgcagaaaggaggcatagcggacacacaggattgctggacagctagagagagggctcagtggtacttgtgggacagcgcagtggccaccccagccaccagcttctgccaggcagcctgcatctcagctgtgaattcattgccgaagtgactagccaaaacaatcaccagcacattacccaagagctgttgatggaaagacaaaagaaacaaatcggtgtgttaaatgaagatttgaaacgaataagcattaaaaaaacaaagaaatattttgaacccatactctttaacacattcagcatcaaagcttcctcaatcatctctgatgagcagagattccatttttctattgttcctctttttttcccactcaccactgttctgcctggattctcataccttctattctcagcatatttatttgcctgtcgttattctcattctacagttgtctagtatctgtaaattcagaatttgtgttttcctactgctgttggtggagttttaaaactacccccaatgtaagaacaagcctccatttgtcaagatattcacctggaaatttaatacaattttatgtttattgagaaaattcaccataaggttgtcttgcaagacttttcttcaacatcaatcaataggacccacaaaaagttaagatttttccactccctattccatttcttcttgcatagatctactacttttcatattactctccatgataaatccaagaaaattttatcacgacaaaattttctaaatgtttgtaaactaatttaggtttcttacagccattcactgtcaccctactgggaccaattaattaactttgacagctaagtaagcacccccttattcatattcttggcttctcattttgtccccgagacaaatccaaaataaatttgtggcattgccctagactcactttgaagttctcaggatccacatgtagcttgtcacagtgcagttcactgagcttggccaaggcagacttgaggttgtctagattcttaatggactctccaaaagcagtcagcaccttcttgccatgggctttgacccttgggttgcccattatggcagaagcagaggacaagttcccaaagctgtcaaaaaatctatgggtccatgggtacacaacaagaagcctgtgaagtggagaaagacaagtagaaatataagggagcctcagaattcttgatttccctagctctttgtaccctaaaaacaattcttaccttcccaaggcttcaccaccaacctcttcaacattgaccttactccacaggccattgatgagggtcttttcctcagcagtaaagttcaccatgatggcaagtctgggaggttgctggtgatcacaggagtgtcagaagcaagtatgtactgctgctagaagtggtggccttttatgcttcacagacaatgttctgaccctttgttctgcattattctttgaagctattggtcagcctgacccgtggtcctcatgggtggagccaggtcatgggagggtcagcaaaaactgtacactgtgtttatgataatgcacattagatatggaggtattctttcttttttggctcctccttcaacaaaaactctctttgttttgcttattctcttttcattttctactctccacatgtaaactcccagtataacgcccatttctcttatcactttttccaacaaaggcacagaaagaggagtttagcccactataggaaaaaaaatccagtctaaaataactttaccgtttagggaaagaatggctataataataagaacaaactcatgaaaaaaggaatttgtgctgtggacacagaaatgccaatattacatctgtttctccttttcttgggatatgtgctttataactctatctcctagatatatattgccccaagtagacaagacttatacatagttgcatctggaggatgaatacagtagcaaaggattgacaatgggtccgaagactcaattccaaaatacaacaacaggaagtgacagtgtagagaagatggatataacaagttcttgttttgtgattctagagagttctctgaccaaacctttgtgaaccttactccgttagtaatattgctttgatctttttccttgcttaatcccatatagatatttctcatctgtgaggtggaactgaaataactttaaactaggcttgtgattcaactgaggaatgagtgagttgattcatcaatatccttgagaaacatttgtggatagtgtttattataactaaaggatggctagtgtgcttgatttctaatctcttcttggaattattagctatctcctacgtattggacctgaaattaaaagcctacatttgtatgtgtttaactgcatccatgtgcatgaaggatagttttacaccatcctatttaatctgcatctggcaagacagttatcattatccaccttttattcaaataaacagaatcacaaaagtgatataactgtaaggtgagagaactgttgaccaagggaggaaggctccagatttggtcacagtttggctttcctatttataggaaagttgtcctccaacctgcctctggtcagttctgcctgcatttcttccttttacctcctctatggcttcttgtgctcctaacccccctaagagtttctcttccaagactttcattttatttagtttagttctgttttattttttacatttgtttgtttttcttgtggggcccaagtgatagtgcctatttttcatttagcaatgtggcttcggtgtctcaaatctttgtgttccaaatttacccagaggatcttctctataacctttggcttgccctggcttttatgatgatttgttatgtgtctaacagccatttctgacatatgagaacacctttgttttactttcttctatgcttacagaagcattatcttgtttaaagtgtccccaaattggcattattacaagtaattgaatctctggccctctgtcagctttttctctacattatcttttgagtacagattctaacccatggccagtatagatgtgaacttatcttctcatggcatagactatttggcagactattacctactaaataatgtatatacataggattgactagaatatggatactttatacatgttaaaatagctacgtttggtgtgatgcaccttcttatgaacacattaagctaacaggatgaccatggtatccatgtcatacagactgaaagtaagcatatctgttacaactagagcataacattttaaaaaatgttctgtgggttcagtttaaagttttcttgcctataatagacagcctaggaaaat

SEQ ID NO: 519 - DNA, 25454 bp, Mus musculus
ctaaaggaaaattaagaatagtactcaattaaaatttttacatatgttatttgctattgtagttctacgatacttaaattctctgaggtatgtgtatctaaatccaatgatttttgtagcctccctgtcttaagcaggctgatttagaccttgctgccactgagaatgagaccacctggggtggagccttccaacctagatggttctattgttctgtcacctgccactgctcttctccaagatgctcctacccactgagaggctgaacctgtcttcctgagatattcctgagatagctgacaacctgtggaattggtgacataatactaacagttagggcagactagtgctaacaacttagcaacaaagtctggagtggcatcccccctttataagcacagactcttagcaaacattgggccttgatcagaaatctgtcttggcctcttttcttctttcacgttctctcccttacagctccggcctcccactcaggaatctagtttgtgtggccacaggcggctacaggttttgagtactgagttgctacattgtaatttaaattactatcatgaatgtacttatgctcacaacagcattcacgacacaaatgcattgtcttctttattgatgagaaaggaacacaaatgtaatagtataaatgaatttctaagaacatataagatgtgaactggtagttataaccaaagtgcactatctattgtgctatgtatagcatattacttcttgttgagcacatggtatagagaagcccacagagctctccaaagtgatactacagggacatttctgttcctgctgaataatacccctttaacaccaagacatgaagaaatcatttatcatgggctcaaagaagtagaaacataaacttcttcttaatcacttcttctaacatttacttcatgaatatgtggggccaggtgaccataagcatatcctatctttttgtaccatgtgtttgtgtgaagtagcattctcaacatgactggaatattcaaaattttcagctgaaaagcattgaggatgttgtatatattacagtgctgaatattaaggatagctgtcattcttactataaaaagaagcaagcaattgaatctcattagcatgcagaattgtctttgtgttaaataaatagtaaaattacatttataaaaaagagcaagccagtcaatcctttggcatggagtgcagagaggctcacatctttaatggaggagctattgacagctggtgacttcatagggaggaagacgccattcttgaaggctgtggcttctaagtagttcagcctccctccagtggacggtcccacacttctgggaagactgaattggattaataaagttattaaaaagattcaatgcaatatagaacaggatactaaatttaggaggagtgaagaggtagaaacagatctgggagggccttatagaggagagagggttgaatatgatcaaaatatgatataggaaatcctcaaaaaatgaaatatcatcttaaaaattaaatatataaaaaatagagtctaagatatacttgtactttctacttctttagtcatgactgtatctcataggaatatatgagaagaaaatttaaagacatgctgaaaatgcctagaataaaaaaggatactctcttgaataacagagatttttcagatgattatttataggtacctttttttaaattttttttttgagaaaactggaagtcatggatgctcaatttgccttataagcctttggccaactggcaaattttattaaggagactgagcatgcattaagttccatcactaatttttgtcctaaaactgacttcccattcattgacattaacttaaagcctcattatcttcaaaccatataaatctacccacccagtgcacacctctgtgacattttacctctggtcaggtccaaagatcttaataagccaagagaggcagcatgttgtgttgttacaataggaatactcgacctaagacaaaatattactagaccctctatttgcacagtctgacaatagaataacctcatgtcttactagtatatattttactccatatactaacagcttcaaaaatagctttgtgtttcatctcattagtctcatcttcagtgagtatggaagaacccaataccagtcctatagacattcttgtcaggacagtgctctcagctgttgttcaaaagtcagctggcattgttcctctcaggctaatcttagacacttcacattatctcgtgaaattctaggaagaagagaacttgaatagagagtgaaaatgaccagggctccctgggactaaaccaccaatcaaagaaaacacatggaaggatttgtggctttagctgcatatgtaatggaggatggcctagtcggacatcaatgggaggagaggcccttggtcctgtgaaggttctatgtcccagtataggggaatgctagggccaggaaacaggagtgggctggttggggagcaggggggagaggataggggattttaggaggggaaactaggaaaggggataacatttgaaatgtaaataaaaaaatatctaattaaaaaacaaaacaaaaagaaaatggctaaataggaatgctggatagagaagtttcctgtacaatgagttatatttaagtatctcctgaaaagttgtatttggagacctcaatattgttttacaatattatgaatctgcttaagttagaaattcaaatgatagtggaaattgtaaagccacctgtggattaagtattcaaatacagcctgggagagacatccagcattcaaaccctaatcctcactttctccattttgtaaaatgtgagatagaaattttgaggggagaagtagattcctcaaggccacacaaatagaaaggcctagaaccatacttgggttcaagggtaattttaaagtttttgtaatcctatcctcttcccttgcctgtggctcttgcttaaaacacaagctatattattattctgtgttttacaacttgaagaagccaagcaaattgctcaagcttacagaggaagtaggtaatatttctaggataagcagtccctgcccttttcctttcttttttcttttcttctttctttccttcctcctttccttacttctttcttttcttccttcattttgagtcaggattttactatataactatgctatcatggaacatactatgtagatcacgattgactggtactcacagagatctgcctgtccctgcctcgtgaggtcttagactaaagttgtgacctccttcactctatatccaactaaaacgctgaccattgatggcttagtttaactagaaattgccttgaaatcattgcagacattcactggtaccctgtttccttatctgacctgctttaactgggtaagcttatgaaaagtcttgtgtagaagagaaagggagaacagcctgtgctaaatgaggaagctgccttgcctgttcctgctcagtggggtttctggctatactacatcaactgagtcagtgcatcttgactagttcccacacctttctctgaacagagagagtaaagggctcaataagaaaaatacagtttatggtctgtacgttgtattacatgtcatcccttactttctaaaaggcatcttcactgagaaagacatggatttctaaccttacaatctctacaaagttcagaatatataataatcttgaattatgattaactgttaattttgaccaggtcttctggcagacaggtcacatgtgttagtatcacttattcctcaagtgttgatgttagtatcagcatattaccgatgttccacaaacatttcctgaatgactgttaagcttcctacacattaacgagcctctgcattttttccagcttccatctatgatttaagtaaactctagttttccacttcttcatattctctctctagatctcaattattgcagtaccactgtccaagggcagaggaggttagctgggcccaggcggagtcagttctccactccccaccctgtgggtgtgttcagccttgtgagccagcatctagcttgagcacagcagtgctgagtcatgctgagtcatgctgaggcttagggtgtgtggccagatgttttcagctgtgactgatcagtgctatctgggtctctaggaggaagtccacagggaaggtgaaaagaaaataagtttgctacctgaagaaaacattacttacaccagcattacaatgaaaaggggaccctgccttgctgtgtgacataacctagaatattttattttctagttaaaaattacttctcatgatctttattagatgttataacaaatcattttttataaatgtaaagtttatttagactcatacctagaagcaacagaatcacacattttagtacacacacacacacacacacacacacaagagttttgttcataaactatgcaattgttaatgaaatgctatttggaatgggcttgaattcattgcagacattcactggtaccctgtttccttatctgacctgctttaactgggtaagcttatgaaaagtctggtgtagaagaggaagggggaatagcctgtgttgttagagttagggtcattggatctgtactaggtagttccctggcaagttcacatttaccctgtaatctagcacagaaccttagtttaggttagaatcagtattgtaaattctggttaagtgaattctaccattctcacatcattgtgaacatgagaggtactcatcagggatgtaggaattaccccagaaagacaggtgatattttggggtacaaatgcgcatttggaggaagaaaaggaagcacctagccctccttagttactctacagccactgctttggaaccaaaggccttctctgcacagatgtgtttcctctggttgttctgtcatcagagtttcctctcttcaaagaaaaaataaacttcttccagccaaaaagccatggcttttaagccactagttaccatccatgagagatattgcctgatattgttttgacagttctaatatgtagaaatgttccaaagatgatttttaatttctctaatttccaatctagtagaacttccaaggtatttcttaggtcatgattataataaccacaggtatagatagaggttagcacaaatttactgcttattgagcctcaaaattcttatactaatacatgctccagtttagaaattagcatgcattagtgggagcatgagtgtgcgcaatcatggcaggcatcctgcaaaggaatagattatgagactagcattgtgccaacagctcagttattacttttattcatttcctttagggaaaggagagtcatggtctggagaaagcatgttaggtccaaaatgtctctagggtagccaatagggaactgttcttttctacagttttctattaggccagttccttaattactaactttttaattacatatcagactcaacagttaaaaaccccttgctctgaagccttttagttgctttataatattttgagcccctcctttgatcttttgggttgtttgttttcctttttgaaaaattgcatctcagttgtattttgagaatgtgatttatttatttccttggctctgtagacttcataaattatattgccatggtacacttgaaaattttggtaatagcctcacatttattacaatatctgtacacttttatatgtattacatgaaacgtatttatcaggctttcctaagccagatcctcaaacactctcccataacacatacctcttatctactcatgaaggagcaatgatgggacaaagaaggcaggagcccaaacacactggcttcccccaatctcacggaggcctcaaccttgactcagctctgtgcagctctggctcttatctgtcaccacagtctgtgaccccacccagctgacactaccccaagtcccagaagaagaaaaacaccagttctttctacttctacttatttaaataaaataaaagaaagccttacacccctggacagataaacaagaataaaagaaagaagaaagaaaagaagaaaaaagaagaacatggaggaagaaaattggtccagtcagaaattgtaacaaaggcttgagtgaggcaggattattgagaattggtctcttggcaccttggtctaggatcctgaaaaaggaaagcttcttccgtttatagatgccttagactcactgaactagaggctcagatgacttactttcagaatggctttttcgtgttatgaattttggggcaagaacaatcactaaatattaccaacttcagggacaaagagcacagggtctcagtttctcacaatgtcactgggaatgaccttgctaaaggatggagtctggccattgtcagggtagttattatttaatctcttcttacttggccaatcctcatatcttttcccacagagatgtgagtttacagttcaggaaattccctaagttataacttccacctaggacactaaatgctgaagaggtatgcctagctaaaatatagcatttttactttttttttttataaatttcaaatattaccaaatcaaaaattgccaaattcaggcaaaagataccgtcaataagacaaaaagaccaccagcagattgggaaaggatctttacctaccctaaatcagataggggactaatgtccaatatatataaagaacgcaagaaggtggactccagaaaatcaaataaccccattaaaaatggggctcagaactgaacaaagaattctcacctgaggaatagcagagaagcacctgaaaaaatgttcaacatccttatttttttattacgtattttcctcaattacatttccaatgctatcccaaaatcccccaaaccctccccccccacactcccctacccacccattcccattttttggccctggtgttcccctgtactggggcatataaagtttgcctgtccaatgggcatctctttccagtgatagcccactaacatccttaatcatcagggaaatgcaaatcaaaacaaccctgagattccatctcacaccagtcagaatggctaagattaaaaattcaggtgacagcagatgctggcgaggattcggagaaagaggaacactcctccattgttggtgggattgcaagcttgtacaaccacgctggaaatcagtctggcggttccttagaaaactggacatagtactaccagaggatccaggaatacctctcctgggcatatatccagaagatgttccaaccggtaagaaggacacatgctccactatgttcatagcagccttatttataatagccagaagctggaaagaacccagatgcccctcaacagaggaatgattacagaaaatgtggtacatttacacaatggagtactactcagctattaaaaagaatgaatttatgaaattcctaggcaaatggatggacctggaaggcatcattcggagtgaggtagcacaatcacaaaggaactcacacaatatgtactcactgataagtggatattagcccaaaacttaggatacctaagatataagatacaatttgctaaacgcatgaaactcaacaagaatgaagaccaaagtgtggacactgtgcaccttcttagaattgggaacaaaacacccatggaaagaattacagagacaaagtttggagctgtgacaaaaggatgtaccatctagagactgccatatccagggatccaccccataattagcttccaaacgctgacaccattgcatacactagcaagattttgctgaaaagacccagatatagctgtctcatgtgagactacgccggagcctagcaaacacagaagtggatgctcacagtgagctattggatggatcgcagggctcccaatggaggagctagagaaagtacccaaggagctaaagggatcttcaaccctataggtggaacaacattatgaactaaccagtacccctgagctcttgcctctagctgcatatgtatcaaaagatggcctagtcggccatcactggaaagagaggccccttggacacacaaactttatatgccccagtacaggggaacgccagggccaaaaaatgggaatgggtgggtagggaagtgggggggggagggtatgggggacttttgggatagcattggaaatgtaattgaggaaaatacgtaataaaaattttaaataaataaataaataaataaataaataaataaataaataaaatcaaagtgaaaaaataattgccaaattcactttgcacgctagaagtatggatggaccctaatctcacaataaaacccttttgaaaatcatattcagccatagaattcttatatctgcacatcagtatggcttttgaggcaacacttttttagacattattcaaatatttaattagtgcatacttaagaagggctacattttaataaagttcaccagttattagttaatgtaattagctagctaaaacaaagaattttggctattccctaaggtataaattgaagcagtataaaatgaaggggaatattgaaaatataaagtacctacctaataaaagggcctatgtgttttattatgtcagagtttttggtgagttgatcttgatttataaaatacacaggtgagcttatttaacataaaaagataagagttctctagaattttaatcctgaaaatagacaatttatttactctaggacccaagttaaaaaagaatgccatggagatgataaatagatcatagggtaagctattataggatattgtaaaaatgcagaaacttgttttacctagaaggtatgagagctttctgccaatgaaaaagtaaaaatagggttaataaacagtctggcttgttttgtttgaatttagataatgacaataaattatagcttaacaaaaatggagtagtcttagaccagtgactcatctgtttccttctgatcaagtacccaagtagcctgccttagatgggaatataaatatatatatatttgctgctttggagaacctgtttaaatgttttacacttctacacatcaatgtagcaataatgttaacattttaaaagcattttaaaaaatgccaaagaaaccaagaaagagaagtgatgttatgggagaaaatagggcacttatgactttgttccaggttaccagtttcaagagaatacctggctgactatggttttctattttctcttcctagtaaaaactctcgtgataattaagtgccagacacttctctggtttttcagtatagccccagaggtcagtcaaacaggtgtctgctctgaactgaaaagggagggatttctagctaagaaagacatggctctctctttaactcatcttcaaatcatgaggctgatgcattcagtgtctttgacattttccattgcatgttccttgaaggtttagggcttcctgcagggattccaccttgctgtcattagtatgtagtcattcctagttaatgcaacacctaagaaacttactctatctaatttattgctgttctgggaatatgaatggagacataaaatggaagcagagtagtgaccatttcttttaataaaattacaaaacatgtttttcctgttcagaaacttcactcacaatttttctaatttaaaactatttatgatgaagaacaactgtagagactatttttttcttgtttaacactgaaaaacttgtgtttaagggcctaatttactacaaacagtatacttcaaaaatttctatactaataacatctaaaattagcacagcattgaattctttcttttaaaaagattgtagcagccataggaattgaatccattcccagagctttgtacatgctaggcaaacactcagacttggggttttgaaacaaggatgcactcaagctgacagccagctgattttgtctattcagtcttaaacttgaacaatcaaaacatctttctcaccctagagttacattttcctaggctgtctattataggcaagaaaactttaaactgaacccacagaacattttttaaaatgttatgctctagttgtaacagatatgcttactttcagtctgtatgacatggataccatggtcatcctgttagcttaatgtgttcataagaaggtgcatcacaccaaacgtagctattttaacatgtataaagtatccatattctagtcaatcctatgtatatacattatttagtaggtaatagtctgccaaatagtctatgccatgagaagataagttcacatctatactggccatgggttagaatctgtactcaaaagataatgtagagaaaaagctgacagagggccagagattcaattacttgtaataatgccaatttggggacactttaaacaagataatgcttctgtaagcatagaagaaagtaaaacaaaggtgttctcatatgtcagaaatggctgttagacacataacaaatcatcataaaagccagggcaagccaaaggttatagagaagatcctctgggtaaatttggaacacaaagatttgagacaccgaagccacattgctaaatgaaaaataggcactatcacttgggccccacaagaaaaacaaacaaatgtaaaaaataaaacagaactaaactaaataaaatgaaagtcttggaagagaaactcttaggggggttaggagcacaagaagccatagaggaggtaaaaggaagaaatgcaggcagaactgaccagaggcaggttggaggacaactttcctataaataggaaagccaaactgtgaccaaatctggagccttcctcccttggtcaacagttctctcaccttacagttatatcacttttgtgattctgtttatttgaataaaaggtggataatgataactgtcttgccagatgcagattaaataggatggtgtaaaactatccttcatgcacatggatgcagttaaacacatacaaatgtaggcttttaatttcaggtccaatacgtaggagatagctaataattccaagaagagattagaaatcaagcacactagccatcctttagttataataaacactatccacaaatgtttctcaaggatattgatgaatcaactcactcattcctcagttgaatcacaagcctagtttaaagttatttcagttccacctcacagatgagaaatatctatatgggattaagcaaggaaaaagatcaaagcaatattactaacggagtaaggttcacaaaggtttggtcagagaactctctagaatcacaaaacaagaacttgttatatccatcttctctacactgtcacttcctgttgttgtattttggaattgagtcttcggacccattgtcaatcctttgctactgtattcatcctccagatgcaactatgtataagtcttgtctacttggggcaatatatatctaggagatagagttataaagcacatatcccaagaaaaggagaaacagatgtaatattggcatttctgtgtccacagcacaaattccttttttcatgagtttgttcttattattatagccattctttccctaaacggtaaagttattttagactggattttttttcctatagtgggctaaactcctctttctgtgcctttgttggaaaaagtgataagagaaatgggcgttatactgggagtttacatgtggagagtagaaaatgaaaagagaataagcaaaacaaagagagtttttgttgaaggaggagccaaaaaagaaagaatacctccatatctaatgtgcattatcataaacacagtgtacagtttttgctgaccctcccatgacctggctccacccatgaggaccacgggtcaggctgaccaatagcttcaaagaataatgcagaacaaagggtcagaacattgtctgtgaagcataaaaggccaccacttctagcagcagtacatacttgcttctgacactcctgtgatcaccagcaacctcccagacttgccatcatggtgaactttactgctgaggaaaagaccctcatcaatggcctgtggagtaaggtcaatgttgaagaggttggtggtgaagccttgggaaggtaagaattgtttttagggtacaaagagctagggaaatcaagaattctgaggctcccttatatttctacttgtctttctccacttcacaggcttcttgttgtgtacccatggacccatagattttttgacagctttgggaacttgtcctctgcttctgccataatgggcaacccaagggtcaaagcccatggcaagaaggtgctgactgcttttggagagtccattaagaatctagacaacctcaagtctgccttggccaagctcagtgaactgcactgtgacaagctacatgtggatcctgagaacttcaaagtgagtctagggcaatgccacaaatttattttggatttgtctcggggacaaaatgagaagccaagaatatgaataagggggtgcttacttagctgtcaaagttaattaattggtcccagtagggtgacagtgaatggctgtaagaaacctaaattagtttacaaacatttagaaaattttgtcgtgataaaattttcttggatttatcatggagagtaatatgaaaagtagtagatctatgcaagaagaaatggaatagggagtggaaaaatcttaactttttgtgggtcctattgattgatgttgaagaaaagtcttgcaagacaaccttatggtgaattttctcaataaacataaaattgtattaaatttccaggtgaatatcttgacaaatggaggcttgttcttacattgggggtagttttaaaactccaccaacagcagtaggaaaacacaaattctgaatttacagatactagacaactgtagaatgagaataacgacaggcaaataaatatgctgagaatagaaggtatgagaatccaggcagaacagtggtgagtgggaaaaaaagaggaacaatagaaaaatggaatctctgctcatcagagatgattgaggaagctttgatgctgaatgtgttaaagagtatgggttcaaaatatttctttgtttttttaatgcttattcgtttcaaatcttcatttaacacaccgatttgtttcttttgtctttccatcaacagctcttgggtaatgtgctggtgattgttttggctagtcacttcggcaatgaattcacagctgagatgcaggctgcctggcagaagctggtggctggggtggccactgcgctgtcccacaagtaccactgagccctctctctagctgtccagcaatcctgtgtgtccgctatgcctcctttctgcacatgaatactggactgttccttgaaagcacatcatgtttaataaagatcatccttcctggtaatcaaaaattcagttttgtcttgtctgctttctacttttatgctaaagacacatatttgatgtgtttttggaaagggggaagcacaggaagactcaggcatttatctgaaacctgcagggactcaagagagaaacgtagaagccatggaaggcttctacaggcccagtgagagtctaaagctgagaaagaattctcagagagaagaaagaaatttagtggagaaggcattgtgtatggaacatatgaacatttactgtagagggtgaagaaaagggtgacaagtgataccttgcagcaggttgtgacatcccattaccattaggaaaaagcttttacaagatccaagagctaatttagaattaactttctttaaaaaagcatttgttgggtaaccaattggtgtgctctgccccggggaagactcttgatccagctctcagcaacccttagttgactgtaattctttgtgtatggttgaggtctcatgggctttatttaccccacccatattagcaaatgtgtatcacagcaagcttcatggtcttttggctcttacaatcttttgcccttcttctgaagtgttccctgatccttaggtgtgtagatgtatccactgaggttaggctccacaactctgaagtttgaatggttgtggatttctgtactggtctttgtctattgcaaagagtgttctacatgagaggagaagactacaacttatacatatacacacacacacacacacatacatacaattacaatggcaaaatgacacgattttgaaacatggggagggggcaacattggagatgtaaagtgaattaattagtggggaaaaaagaaaataaaaaagtaaaaaaaaaatcataataaaagtaaattattttttaaaataattaaaattaaaatttgcaactgttcagaaaagtttttcagacagacatttggtgtctcggtatgtaagtcagttgatgaaatgaatctctggggtatatgaatcctgagactggagcactaccaaaaagacacaaagtagcagacttatagagttggttatagaatcctcctcacttttgtgttttattttagaaggtagcagatacatgtaagtagactagcccttgaaattgacattttgttctagggaaggagaaataccctatttatgtggattctaatgactaacccttcagcaaaaatacgagagaaaacttgacagatgtttctcattggtttgatgaacttcctaaaaaatattacaatcccaatgagtaatatcataagtagtccctgcttccttcattataggaaactctagtaaatacatggtaatcctgtatttgtagaagccaggccattgttgaatgagaaaaggggcaagaaacaaaagtggcagactgaggaaaagtaaggaacaagtagagaaggaccgaatggggtcgaggagggcccttgagcaatgagattgaaccagcatcctcattagagtggacagactgctggggagtcctcaaggagactaacttacaaatgctgtttgtcctgtaaattcttttctttatttccttttctcatttttgtatatctttttgtgtttccttccatagctcctgggtaacatgctggtgattgttctttcttcttactttggcaaggaattcacagctgaggtgcaggctgcctggcagaagttggtggttggggtggccactgctctgtcccacaagtaccactgagccctttccctgatgtccagcattctgtacacccctcagctctgccatacccatggccactgtgctggtctctgaaagcagggcttctgcttaataaagtccattcttttcagtaacccatgagtcatattttgttgtgtctgtttcttacttttgtgtttaaagaaagaaggctgatgggcagatggtaagggagcgagacagaaggacgcttgagtttcttttagaactttgctggaattcaggagaggaaagtagatgttacagaatttttctagagccccaggaaagatgagaagttggggataattctcatgtaggaaagcaaagggttaatgccgtggagaaaaaagttctgtggtagtcactaaaacttagtgtagagggtgaagaaatgcatgacaaatgatcacctacagtctgtgttatgtgccatttaattaagttaaactttagacagatctaatgctcaacctgagataatcagtttaattattttaaaaaataatttacttttattatgattttttttacttttttattttcttttttccccactaattaattcactttacatctccaatgttgccccctccccatcccccctcacacaatttcttctcacatcctgcctcttctcctctgaaagggttgatcccctcctagggtatccccgcccacacacacacaaccctggcatatcaactctcttcctgactaggcacatcttttcccactgaggtcagacaaggccatccacttaggggaattgattctacagacagtgaacagctttagagacagacaggcttatattttccagttgttgggggaaccacaagaagattgagctacacatctgctacatatgtgctgggacctaggttcagcgtgtataagctctttgattggtggtacagtctctgagaccccctaacagtccaggttagttactctgttggtctttctgtggagttcctattcccttagagtccctctatcttacataagagtcccaagctgcattcaatgttggcattcgtttccaggaggggttcaggtttaagtgtgggaggagacaggagagggggccaaagggcctggagaatgaatggaaatctgcagttggcaatgttgtaggtatgggggaacattacaagaatgtgccataaacctgagatgggggaggctcctgagggttcatgggggaggtaaccttatctgagactcatagcagtgggggtatggaatctgaaaagtccacctacagtagccagactggaagtccagtggaggaataaggacactaacccatccacaaaacatttgaccccaatttgttctgtctacaagaaatgtagaaacagagagggaacaggaattgagggaatggccaaccaataacaggcccaactgtagaaccatcccatggacaagcactactccttgaccccatactcacttatgcttgcagacaggagcctagcatcaccatcttcctagaggttccacacagcagctgacttaaaaaaaaaagatttatttctcttaatcaagtatctctgcatttatctgtgtttgggtttgtgcacgtgagtataggagactataggcatcaagttccactagagctggagttacagatggttgcgagctgtatatgctgagaattcaggtgctctgaggaaagtatttgctctcaaacacggagtcatcatctctcccacgctaaatgaacattctccaacagatactatatcagatgtcctctggaactgatgaaagaaaagggacaagttgatagaaagcattaaatatataagaaaaagtttcaatgaaaccaccacttcagacttgttttttgaaggcattccttgtctcaaggaggaatgaaagctaagagatgcgaccactgtgcttttctgtgctactgtaataagcaatatgattatgatagggaaagaatataaatggaatcttctccagacaggtgggcatgataatttcatacacaggacatctacaaaaatgccaaaaagttctgtcatttaaggtcactgaactagatcttgatgatttgtataaaactagaagatgctgaagagataaaatactggcaaaagtagacaatagggatcttaattataaaaatctcaatattaatactttattaagcattaaacaataacacttacctggtgaaatatgcttatcactccactacttgaaaggctaagcaaagtgtcacagtttcaagagttacctgagcaacagattgagttcaaggacaaccaaagaactcaatgagttgctacctcagaatgaataataaaaacctggtctgagggtgctgctcagagcagagcactgtcctaacatgtggactgctagggaatcaagatccactagcactaaacaaaagacaccaactgaattgattagtaaagaataagcagtctcaggatttctgactcaagaaatggtattactaagaaaaatattcttaaggatccaatttaacttaaatgcttaggaaccattacagagatataaaagtttaaaatgaagaggtgaagcaaggcatgcaacctgaggtaatgttcaaaggtgggatgggggagacagtgtcagattaactctaatatatgagaagaaaacagaagatagtagaagatgaaatcacaaatactgagtggacataactacataaagtgtacattgacttggaaaactcatgtggataaaacacacttgagagaatttaaaggtgctcaaagaaattcaagccctagtcaatctcttgtcaaggctggtgatctttaagtggtagaggtaagataaccacattttagctactaaactatattccctcatcctgattccatagattggttagagtatgactggtggattgtatttcaagttgtctttgtccactttaaatatgaaagaacaatgattcttgtagttttaggctatcaacaacattggcctttttggtctacagcatttcaatatggcaattaacaggaaaacaaaccaaaccaaacaaacaatagcaacaaaaatgcaggcgttgtatatgacactcgttttctctggacctgtcaagagatgagacaatgcccattttttataaatttacttttctccttatgccatcatgaatattttggctctagaaatcagcggataaaagatggcaattatgcagtggtgggaggaaagtatatttgccaaatgtttcagggctatatatacctataaccactccaatggaaaaaaagagataactgaaaaatagttcttcatatgtgcacacacacattcacatatacaggtaggatgataaaagacttttgcttgttttatttctcaagacaaggtcctcttctgtagcttcgatggcttagaacttaatatgtagactgtgtgctagcctcaagctcacagagatgtgtctgcctccttcttctgagtgctgggattaaaggcatgtgctattctgtgcagcctatgatagtcaatatacatttgcaataaaaattatttgagagaagtactatgaccctagaatagtagtgcataagaaatgagtagtattcaaaggttatgtcattatagtttctcattcctattaaggaagatggattcctctgttagattatgagcactgcagcaacacacccaccatgttccactttattatttttatatttagtgatcatggatattatcagcttcactgtcacagaaatatttattttctcttccttcagaacactgaatttgctattacaacattttccagtatctttctgtgacatgttacttctagacattctggacacaacaaacttaactcttcattatgtagagaaactgaattccataccaccatgtcctgtccttgttaatcccaattgttaattttcttcctagtaataacatattaaaatcttttttgtttgatatacttactcatttctgtatcttctatctcctagtgaatgaggctagagaaaagttctgtcttgtctctcattcattataaatcccaggacttgtgaaggataattctacagagaggcagcaggaatgggtgggtgggtgaatgaacaccctcatagcagggggaggggagataggataggagggcttggggggatgggaaaggggataacaattgaaatgtaaatttaaaaaatcaataaaagagaaacaaaagatcccaggactaataataataattatcacatagttatgagacaaataatgattgagtgaacatttgagattacatgaattagctgtcataaagaaacggtttcaaaatcctggactaacatgacatggggattatggagggtctattaatagacatgaactaattaatacaactttgtaggaaattcccccaagactctgctgaagagcaacttagggttactggttaagatatttggaagcttaaactcaggactaccaactatcctccaagattaaatcatggagatagaagctaaaggaatatatatgtacatatttgccatctcacgaatgacttccttttaaaagatcatagctctagaaggtaccagagatcggggagctgagaaactttcaggattcaaagggagggacctaagatgaaatgccctataatgagaagagggaacttgtagagtccacctccagtggaaagacagggcatcaagtgtagggatggtgttgccatcccacagtcataaactctgacccaatactgaaggataattctacagagaggcagcaggaatgggtgggtgggacgaatggagaagagcctgaggaaaaaaaggttcagtgactggccctatttagaatccagttcatggggaggctccaaggcatgacactattactgatattatggtgtgcttacagacaaagtctagcatggctgtccaacatgaagctgagtcagatgcagatacatacacctaaccaatggacagaagtcatggacccctgtggatgaactagggaaaagctggaagaagctgatgaggagggcaaccctatatgaagtttcaactgacctagactcctgagatctctcacacactgagccaccaaccaggcagcatacaccagctgatatgaggtcactgacacagatacagcagaggactgccttgtctggcctcagtgagagaagatgcacctaacctttgagagacttgaggtcccagggagtggggaggtctggtgtagtgggagtggggaggcatcttcttggagataggggaggaggtatgggatgaagaacaatcagaaggcagacggggagggagataacaattagactgtaaaaaaaaaagatttatcagtgaaaagaaagaaacagagggggggagggagagggggagggggaaggggaggggagggggagggggagaaagagggagagggagaaggagaaggagaaggagaaggagaaggagaaggagaaggagaaggagaaggagaaggagaagaagaagaaggagaaggagaaggagaaggagaaggagaaggagaaggagaaggagaaggagaaggagaaggagaaggagaaggagaaggagaaggagaaggagaaggagaaggagaagaagaagaagaagaagaagaagaagaagaagaagaagaagaagaagaagaagaagaagaagaagaagaagaagaggaagaagaggagaacatagctggttcttgttaacattgcatgttctttacagccatgcaaataaaaatctctattgaccactacgttaaaatagctacaaaaccttaaaagctgtcagtagaaactcactgctagggatgaacttcataatgtataatccagtcctagctgtgatagtgcatgtgttactgcatggaaataccctgtctcttcacagttaggttacaaacacacaaaaagtgaaaacagagctgagttgaagaaacctgaaagcttgatcatttagtgttctcagtatttaaccagtaatgatcatagagaaggctaaaccctcacccttttcaccaggcagctacacttatcctgggtgggtgggtgggggctgccaattgtatggtgtcaacactgtgcattcaatgggtggaaaatgctgtcatgtacacagacttctctactttagtgtatgatggaatgtggagacatgttgtacttctacacagtaatacatatatatatatatatgtgtgtgtgtgtgtgtgttataaatatgtgtgtgtgtgtgtgtgtgtatatatatatatttttacttagaaactgaaatgtattaggaatggctttcctggggctgtgggaaataagaagatcatgtcctaagcctactgaaaatgcattcaatggttttgcacaccacatctttcttatacgtggcttgtgagtaagactcatatttctatcacttaggttcgtaaccccattcctaaaaatagcctctggctcactgaggcgttcccatgtttgcctatgcttcaacttaaatgtattaatccctctaagtctgaagtgaaaaagggaagaatgtgaaagacacccttgcaaatctcctgttgggggaaggagctaaagagaaggaaagaaggaaagaaagacggtgaactctgggaaagctgcagcaggaggctctgtctctccgaggcagggggcctactggacactatcttagtgcattgctatctagaacttaccccactggaccccacccctgtcttgcccagactctcttgaccaatagcctcagagtcctggggaggggtaaggggagcaaggtccagggtgaagaataaaaggacaggtcttcagcctcttgaatacacttgcttttgcacacttgagatcatctccaagcttctatacctcacaccatggttcacttcacagctgaggagaaggcagctatcacaagcatctgggataaagtggacttggaaaaagttggaggagaaactctgggaaggtaaggaatggagggaaattgtccttgtgcatggcagaaatttccagggtttctatagggttttgtggcacactaacttttaactgctaatgccctatgtcttaggctcctgattgtttacccatggactcagagattctttgacaagtttggaaacctctcttctgccctggccatcatgggaaacccccggattagagcccatggcaagaaagtgctgacatccttgggcttgggggttaagaacatggacaacctcaaggagacctttgctcatctcagtgagctgcactgtgacaagcttcatgtggatcctgagaacttcaaggtcagttctgagcatgctcatgtgttcattatggattttactagggacaatacttggagttgagactgtgcttggcaatgccttgacagaggttagagtccatgggtccagaattcttgtcagtaaccgttgtagaaatcttaatatttagctgtgcatatgttctgggcaacaatgatttgggtgcagatttgagtgagctcccagcatttctggggccttgggtttgattctgagcattggaaactaagcattcaaatattggaattttttaaaaaaggagtatgtttttataaattaatacatctatgcaagaagaaactgaatttaagttaatatcttatcatttgaaaggaaaaataccttaattaattgtgtcaatcttaatgtccaatcctttatggaagactcgaggaggaaatcaaaatatagggtttttttttcttattattttgacaactttctaaatgttttactttcccactgagcattggcacagtttgagccttctctttggttgaacactcaaatctactaagaatcttgtatcgcagtcatgtgttgatttagatttgaccattgatgaatgagacagggagcaaaaaatgggaggagataaaaagggcagaatgaggaaaggtacagatatagccagttgagtggtgtacaagaggagtcatgtaattcagttgtcaaatgcataacaggagaagtgataggtagtgagggactggaatcctcaaggaacgtaacttttacacgtcacagatttgaaactactgatcattcctatgtgcctttttgttacagctcctgggcaacatgttggtgattgtcctttctactcattttgccaaggaattcaccccagaggtgcaggctgcctggcagaagctggtgattggagtggccaatgctctgtcccacaagtaccattaaactccattccagtacactggcaatcccatgtgtctatgatgccctctttgagtccatggggactgcattgagagcacaaattttgtttaataaaattgattcttaataacattgactttttgttttttttttgtttgtttttacttttatgttgaagaaagatctcaatgggcttgttggtgggaaaagacagaagaagaaaccagatagagtgaagtattagggaaagagctaagttaaagatgagaaagttttctccaggaagagatgaaagggtctgttcagtataagatagggtacaaaatatttactgtgcaaggtaaaaagtagggttgcaggtgccaggaggtaaagaagactggtgagatgtgctatttcttttttaagtttcactttttgcatatgagtgagtgtttttcctgcataaacatgtgtgtgtcctacctgtgtgtggtgctcctgcaagccacaatatagaattacatcctctggaacttgagttacagccaattgtgaactgtcaagtaggtactgggagctgaagtctggtcttttgaaagagctatttaccactgagctccctctctagcccaagatctgctagagatttttaagagaatactttaaaatatgaacaaaaagtattgtttttgattagttatatttctgaaagagctatcttacatcttgtgagactgagacattaaagaaaaggggggaattgagtgaaagttgggaacattcctgaaaaaaaattacaggagctactgtacctatactttctttaggtatttgtaaaggttattccactggcacagtgagaaataaaggctatagcatctagtggtccagatcttgtaatggggtgtaacatgggcttacatgaaattagcttacatctagctacttcagaagatacacatttctagagacaaagaggaactagagtcaacttgataagaatttcatcccacattccactccatcaaactgaatcatagaaaaggatgagaccgcgtgtagctggtggctgtatgaacaaggaataggtgaacccgatgggagataaacagagggattaatgtttctgcatcaaaacacagaatttaggagagccaacactacagccagctagtgtaaactggagagtgtggatatatctttcattcacaagccaaataatttcttcatatcttaaggtaacttgctcatagggtagggagggcaggagtctgggctgggcataaagggaagagcagggcccgctgtgcctgcacttacttctggcacagatgtgtttactagcaacctcagctgaaacactatggtggagctcactgcagaggagaaggcagccatcactgccacgtggactaaggtgaaggcagaagaacttggtgttgagtccctggaaaggtcagtatccgacagcctaagggagcaagtggaaggaggtatgtggaggcactgaatttctctgtcctcatgcttcacttgctagaatactgacggtttatccacacaccaagagatactttgaccactttggagacttctccttctgtgctgccactgaagataaccacaagctgaaggctcttggtaagaagatgatagaatcctttagtgaggacctgcaatccctggacaacctgcactacacctttgccagcctgagtgagctgcaccatgacaagcttcatatggatcctgagaacttcaaggtgagttggctagatgtgctgccttctgctcacgctcttgatttctacttactgctgcatcccccaccttctctttcatttgcctacacttaatcgtctaatgattttcaacttttgttcaatatccttcttaatttacccctttcacaatcttcaattaaagaaatgtatttattttatatcctgtcttttgtgctccacccacagctctacctacatttatcctcaagtcccttgcttagaccacaagtcaaatgacacattctgtttttca

SEQ ID NO: 520 - DNA, 25454 bp, Mus musculus
tgaaaaacagaatgtgtcatttgacttgtggtctaagcaagggacttgaggataaatgtaggtagagctgtgggtggagcacaaaagacaggatataaaataaatacatttctttaattgaagattgtgaaaggggtaaattaagaaggatattgaacaaaagttgaaaatcattagacgattaagtgtaggcaaatgaaagagaaggtgggggatgcagcagtaagtagaaatcaagagcgtgagcagaaggcagcacatctagccaactcaccttgaagttctcaggatccatatgaagcttgtcatggtgcagctcactcaggctggcaaaggtgtagtgcaggttgtccagggattgcaggtcctcactaaaggattctatcatcttcttaccaagagccttcagcttgtggttatcttcagtggcagcacagaaggagaagtctccaaagtggtcaaagtatctcttggtgtgtggataaaccgtcagtattctagcaagtgaagcatgaggacagagaaattcagtgcctccacatacctccttccacttgctcccttaggctgtcggatactgacctttccagggactcaacaccaagttcttctgccttcaccttagtccacgtggcagtgatggctgccttctcctctgcagtgagctccaccatagtgtttcagctgaggttgctagtaaacacatctgtgccagaagtaagtgcaggcacagcgggccctgctcttccctttatgcccagcccagactcctgccctccctaccctatgagcaagttaccttaagatatgaagaaattatttggcttgtgaatgaaagatatatccacactctccagtttacactagctggctgtagtgttggctctcctaaattctgtgttttgatgcagaaacattaatccctctgtttatctcccatcgggttcacctattccttgttcatacagccaccagctacacgcggtctcatccttttctatgattcagtttgatggagtggaatgtgggatgaaattcttatcaagttgactctagttcctctttgtctctagaaatgtgtatcttctgaagtagctagatgtaagctaatttcatgtaagcccatgttacaccccattacaagatctggaccactagatgctatagcctttatttctcactgtgccagtggaataacctttacaaatacctaaagaaagtataggtacagtagctcctgtaattttttttcaggaatgttcccaactttcactcaattccccccttttctttaatgtctcagtctcacaagatgtaagatagctctttcagaaatataactaatcaaaaacaatactttttgttcatattttaaagtattctcttaaaaatctctagcagatcttgggctagagagggagctcagtggtaaatagctctttcaaaagaccagacttcagctcccagtacctacttgacagttcacaattggctgtaactcaagttccagaggatgtaattctatattgtggcttgcaggagcaccacacacaggtaggacacacacatgtttatgcaggaaaaacactcactcatatgcaaaaagtgaaacttaaaaaagaaatagcacatctcaccagtcttctttacctcctggcacctgcaaccctactttttaccttgcacagtaaatattttgtaccctatcttatactgaacagaccctttcatctcttcctggagaaaactttctcatctttaacttagctctttccctaatacttcactctatctggtttcttcttctgtcttttcccaccaacaagcccattgagatctttcttcaacataaaagtaaaaacaaacaaaaaaaaaacaaaaagtcaatgttattaagaatcaattttattaaacaaaatttgtgctctcaatgcagtccccatggactcaaagagggcatcatagacacatgggattgccagtgtactggaatggagtttaatggtacttgtgggacagagcattggccactccaatcaccagcttctgccaggcagcctgcacctctggggtgaattccttggcaaaatgagtagaaaggacaatcaccaacatgttgcccaggagctgtaacaaaaaggcacataggaatgatcagtagtttcaaatctgtgacgtgtaaaagttacgttccttgaggattccagtccctcactacctatcacttctcctgttatgcatttgacaactgaattacatgactcctcttgtacaccactcaactggctatatctgtacctttcctcattctgccctttttatctcctcccattttttgctccctgtctcattcatcaatggtcaaatctaaatcaacacatgactgcgatacaagattcttagtagatttgagtgttcaaccaaagagaaggctcaaactgtgccaatgctcagtgggaaagtaaaacatttagaaagttgtcaaaataataagaaaaaaaaaccctatattttgatttcctcctcgagtcttccataaaggattggacattaagattgacacaattaattaaggtatttttcctttcaaatgataagatattaacttaaattcagtttcttcttgcatagatgtattaatttataaaaacatactccttttttaaaaaattccaatatttgaatgcttagtttccaatgctcagaatcaaacccaaggccccagaaatgctgggagctcactcaaatctgcacccaaatcattgttgcccagaacatatgcacagctaaatattaagatttctacaacggttactgacaagaattctggacccatggactctaacctctgtcaaggcattgccaagcacagtctcaactccaagtattgtccctagtaaaatccataatgaacacatgagcatgctcagaactgaccttgaagttctcaggatccacatgaagcttgtcacagtgcagctcactgagatgagcaaaggtctccttgaggttgtccatgttcttaacccccaagcccaaggatgtcagcactttcttgccatgggctctaatccgggggtttcccatgatggccagggcagaagagaggtttccaaacttgtcaaagaatctctgagtccatgggtaaacaatcaggagcctaagacatagggcattagcagttaaaagttagtgtgccacaaaaccctatagaaaccctggaaatttctgccatgcacaaggacaatttccctccattccttaccttcccagagtttctcctccaactttttccaagtccactttatcccagatgcttgtgatagctgccttctcctcagctgtgaagtgaaccatggtgtgaggtatagaagcttggagatgatctcaagtgtgcaaaagcaagtgtattcaagaggctgaagacctgtccttttattcttcaccctggaccttgctccccttacccctccccaggactctgaggctattggtcaagagagtctgggcaagacaggggtggggtccagtggggtaagttctagatagcaatgcactaagatagtgtccagtaggccccctgcctcggagagacagagcctcctgctgcagctttcccagagttcaccgtctttctttccttctttccttctctttagctccttcccccaacaggagatttgcaagggtgtctttcacattcttccctttttcacttcagacttagagggattaatacatttaagttgaagcataggcaaacatgggaacgcctcagtgagccagaggctatttttaggaatggggttacgaacctaagtgatagaaatatgagtcttactcacaagccacgtataagaaagatgtggtgtgcaaaaccattgaatgcattttcagtaggcttaggacatgatcttcttatttcccacagccccaggaaagccattcctaatacatttcagtttctaagtaaaaatatatatatatacacacacacacacacacacatatttataacacacacacacacacacatatatatatatatatgtattactgtgtagaagtacaacatgtctccacattccatcatacactaaagtagagaagtctgtgtacatgacagcattttccacccattgaatgcacagtgttgacaccatacaattggcagcccccacccacccacccaggataagtgtagctgcctggtgaaaagggtgagggtttagccttctctatgatcattactggttaaatactgagaacactaaatgatcaagctttcaggtttcttcaactcagctctgttttcactttttgtgtgtttgtaacctaactgtgaagagacagggtatttccatgcagtaacacatgcactatcacagctaggactggattatacattatgaagttcatccctagcagtgagtttctactgacagcttttaaggttttgtagctattttaacgtagtggtcaatagagatttttatttgcatggctgtaaagaacatgcaatgttaacaagaaccagctatgttctcctcttcttcctcttcttcttcttcttcttcttcttcttcttcttcttcttcttcttcttcttcttcttcttcttcttcttcttcttctccttctccttctccttctccttctccttctccttctccttctccttctccttctccttctccttctccttctccttctccttctccttctccttctccttctccttcttcttcttctccttctccttctccttctccttctccttctccttctccttctccttctccttctccttctccctctccctctttctccccctccccctcccctccccttccccctccccctctccctccccccctctgtttctttcttttcactgataaatcttttttttttacagtctaattgttatctccctccccgtctgccttctgattgttcttcatcccatacctcctcccctatctccaagaagatgcctccccactcccactacaccagacctccccactccctgggacctcaagtctctcaaaggttaggtgcatcttctctcactgaggccagacaaggcagtcctctgctgtatctgtgtcagtgacctcatatcagctggtgtatgctgcctggttggtggctcagtgtgtgagagatctcaggagtctaggtcagttgaaacttcatatagggttgccctcctcatcagcttcttccagcttttccctagttcatccacaggggtccatgacttctgtccattggttaggtgtatgtatctgcatctgactcagcttcatgttggacagccatgctagactttgtctgtaagcacaccataatatcagtaatagtgtcatgccttggagcctccccatgaactggattctaaatagggccagtcactgaacctttttttcctcaggctcttctccattcgtcccacccacccattcctgctgcctctctgtagaattatccttcagtattgggtcagagtttatgactgtgggatggcaacaccatccctacacttgatgccctgtctttccactggaggtggactctacaagttccctcttctcattatagggcatttcatcttaggtccctccctttgaatcctgaaagtttctcagctccccgatctctggtaccttctagagctatgatcttttaaaaggaagtcattcgtgagatggcaaatatgtacatatatattcctttagcttctatctccatgatttaatcttggaggatagttggtagtcctgagtttaagcttccaaatatcttaaccagtaaccctaagttgctcttcagcagagtcttgggggaatttcctacaaagttgtattaattagttcatgtctattaatagaccctccataatccccatgtcatgttagtccaggattttgaaaccgtttctttatgacagctaattcatgtaatctcaaatgttcactcaatcattatttgtctcataactatgtgataattattattattagtcctgggatcttttgtttctcttttattgattttttaaatttacatttcaattgttatcccctttcccatccccccaagccctcctatcctatctcccctccccctgctatgagggtgttcattcacccacccacccattcctgctgcctctctgtagaattatccttcacaagtcctgggatttataatgaatgagagacaagacagaacttttctctagcctcattcactaggagatagaagatacagaaatgagtaagtatatcaaacaaaaaagattttaatatgttattactaggaagaaaattaacaattgggattaacaaggacaggacatggtggtatggaattcagtttctctacataatgaagagttaagtttgttgtgtccagaatgtctagaagtaacatgtcacagaaagatactggaaaatgttgtaatagcaaattcagtgttctgaaggaagagaaaataaatatttctgtgacagtgaagctgataatatccatgatcactaaatataaaaataataaagtggaacatggtgggtgtgttgctgcagtgctcataatctaacagaggaatccatcttccttaataggaatgagaaactataatgacataacctttgaatactactcatttcttatgcactactattctagggtcatagtacttctctcaaataatttttattgcaaatgtatattgactatcataggctgcacagaatagcacatgcctttaatcccagcactcagaagaaggaggcagacacatctctgtgagcttgaggctagcacacagtctacatattaagttctaagccatcgaagctacagaagaggaccttgtcttgagaaataaaacaagcaaaagtcttttatcatcctacctgtatatgtgaatgtgtgtgtgcacatatgaagaactatttttcagttatctctttttttccattggagtggttataggtatatatagccctgaaacatttggcaaatatactttcctcccaccactgcataattgccatcttttatccgctgatttctagagccaaaatattcatgatggcataaggagaaaagtaaatttataaaaaatgggcattgtctcatctcttgacaggtccagagaaaacgagtgtcatatacaacgcctgcatttttgttgctattgtttgtttggtttggtttgttttcctgttaattgccatattgaaatgctgtagaccaaaaaggccaatgttgttgatagcctaaaactacaagaatcattgttctttcatatttaaagtggacaaagacaacttgaaatacaatccaccagtcatactctaaccaatctatggaatcaggatgagggaatatagtttagtagctaaaatgtggttatcttacctctaccacttaaagatcaccagccttgacaagagattgactagggcttgaatttctttgagcacctttaaattctctcaagtgtgttttatccacatgagttttccaagtcaatgtacactttatgtagttatgtccactcagtatttgtgatttcatcttctactatcttctgttttcttctcatatattagagttaatctgacactgtctcccccatcccacctttgaacattacctcaggttgcatgccttgcttcacctcttcattttaaacttttatatctctgtaatggttcctaagcatttaagttaaattggatccttaagaatatttttcttagtaataccatttcttgagtcagaaatcctgagactgcttattctttactaatcaattcagttggtgtcttttgtttagtgctagtggatcttgattccctagcagtccacatgttaggacagtgctctgctctgagcagcaccctcagaccaggtttttattattcattctgaggtagcaactcattgagttctttggttgtccttgaactcaatctgttgctcaggtaactcttgaaactgtgacactttgcttagcctttcaagtagtggagtgataagcatatttcaccaggtaagtgttattgtttaatgcttaataaagtattaatattgagatttttataattaagatccctattgtctacttttgccagtattttatctcttcagcatcttctagttttatacaaatcatcaagatctagttcagtgaccttaaatgacagaactttttggcatttttgtagatgtcctgtgtatgaaattatcatgcccacctgtctggagaagattccatttatattctttccctatcataatcatattgcttattacagtagcacagaaaagcacagtggtcgcatctcttagctttcattcctccttgagacaaggaatgccttcaaaaaacaagtctgaagtggtggtttcattgaaactttttcttatatatttaatgctttctatcaacttgtcccttttctttcatcagttccagaggacatctgatatagtatctgttggagaatgttcatttagcgtgggagagatgatgactccgtgtttgagagcaaatactttcctcagagcacctgaattctcagcatatacagctcgcaaccatctgtaactccagctctagtggaacttgatgcctatagtctcctatactcacgtgcacaaacccaaacacagataaatgcagagatacttgattaagagaaataaatcttttttttttaagtcagctgctgtgtggaacctctaggaagatggtgatgctaggctcctgtctgcaagcataagtgagtatggggtcaaggagtagtgcttgtccatgggatggttctacagttgggcctgttattggttggccattccctcaattcctgttccctctctgtttctacatttcttgtagacagaacaaattggggtcaaatgttttgtggatgggttagtgtccttattcctccactggacttccagtctggctactgtaggtggacttttcagattccatacccccactgctatgagtctcagataaggttacctcccccatgaaccctcaggagcctcccccatctcaggtttatggcacattcttgtaatgttcccccatacctacaacattgccaactgcagatttccattcattctccaggccctttggccccctctcctgtctcctcccacacttaaacctgaacccctcctggaaacgaatgccaacattgaatgcagcttgggactcttatgtaagatagagggactctaagggaataggaactccacagaaagaccaacagagtaactaacctggactgttagggggtctcagagactgtaccaccaatcaaagagcttatacacgctgaacctaggtcccagcacatatgtagcagatgtgtagctcaatcttcttgtggttcccccaacaactggaaaatataagcctgtctgtctctaaagctgttcactgtctgtagaatcaattcccctaagtggatggccttgtctgacctcagtgggaaaagatgtgcctagtcaggaagagagttgatatgccagggttgtgtgtgtgtgggcggggataccctaggaggggatcaaccctttcagaggagaagaggcaggatgtgagaagaaattgtgtgaggggggatggggagggggcaacattggagatgtaaagtgaattaattagtggggaaaaaagaaaataaaaaagtaaaaaaaatcataataaaagtaaattattttttaaaataattaaactgattatctcaggttgagcattagatctgtctaaagtttaacttaattaaatggcacataacacagactgtaggtgatcatttgtcatgcatttcttcaccctctacactaagttttagtgactaccacagaacttttttctccacggcattaaccctttgctttcctacatgagaattatccccaacttctcatctttcctggggctctagaaaaattctgtaacatctactttcctctcctgaattccagcaaagttctaaaagaaactcaagcgtccttctgtctcgctcccttaccatctgcccatcagccttctttctttaaacacaaaagtaagaaacagacacaacaaaatatgactcatgggttactgaaaagaatggactttattaagcagaagccctgctttcagagaccagcacagtggccatgggtatggcagagctgaggggtgtacagaatgctggacatcagggaaagggctcagtggtacttgtgggacagagcagtggccaccccaaccaccaacttctgccaggcagcctgcacctcagctgtgaattccttgccaaagtaagaagaaagaacaatcaccagcatgttacccaggagctatggaaggaaacacaaaaagatatacaaaaatgagaaaaggaaataaagaaaagaatttacaggacaaacagcatttgtaagttagtctccttgaggactccccagcagtctgtccactctaatgaggatgctggttcaatctcattgctcaagggccctcctcgaccccattcggtccttctctacttgttccttacttttcctcagtctgccacttttgtttcttgccccttttctcattcaacaatggcctggcttctacaaatacaggattaccatgtatttactagagtttcctataatgaaggaagcagggactacttatgatattactcattgggattgtaatattttttaggaagttcatcaaaccaatgagaaacatctgtcaagttttctctcgtatttttgctgaagggttagtcattagaatccacataaatagggtatttctccttccctagaacaaaatgtcaatttcaagggctagtctacttacatgtatctgctaccttctaaaataaaacacaaaagtgaggaggattctataaccaactctataagtctgctactttgtgtctttttggtagtgctccagtctcaggattcatataccccagagattcatttcatcaactgacttacataccgagacaccaaatgtctgtctgaaaaacttttctgaacagttgcaaattttaattttaattattttaaaaaataatttacttttattatgattttttttttacttttttattttcttttttccccactaattaattcactttacatctccaatgttgccccctccccatgtttcaaaatcgtgtcattttgccattgtaattgtatgtatgtgtgtgtgtgtgtgtgtatatgtataagttgtagtcttctcctctcatgtagaacactctttgcaatagacaaagaccagtacagaaatccacaaccattcaaacttcagagttgtggagcctaacctcagtggatacatctacacacctaaggatcagggaacacttcagaagaagggcaaaagattgtaagagccaaaagaccatgaagcttgctgtgatacacatttgctaatatgggtggggtaaataaagcccatgagacctcaaccatacacaaagaattacagtcaactaagggttgctgagagctggatcaagagtcttccccggggcagagcacaccaattggttacccaacaaatgcttttttaaagaaagttaattctaaattagctcttggatcttgtaaaagctttttcctaatggtaatgggatgtcacaacctgctgcaaggtatcacttgtcacccttttcttcaccctctacagtaaatgttcatatgttccatacacaatgccttctccactaaatttctttcttctctctgagaattctttctcagctttagactctcactgggcctgtagaagccttccatggcttctacgtttctctcttgagtccctgcaggtttcagataaatgcctgagtcttcctgtgcttccccctttccaaaaacacatcaaatatgtgtctttagcataaaagtagaaagcagacaagacaaaactgaatttttgattaccaggaaggatgatctttattaaacatgatgtgctttcaaggaacagtccagtattcatgtgcagaaaggaggcatagcggacacacaggattgctggacagctagagagagggctcagtggtacttgtgggacagcgcagtggccaccccagccaccagcttctgccaggcagcctgcatctcagctgtgaattcattgccgaagtgactagccaaaacaatcaccagcacattacccaagagctgttgatggaaagacaaaagaaacaaatcggtgtgttaaatgaagatttgaaacgaataagcattaaaaaaacaaagaaatattttgaacccatactctttaacacattcagcatcaaagcttcctcaatcatctctgatgagcagagattccatttttctattgttcctctttttttcccactcaccactgttctgcctggattctcataccttctattctcagcatatttatttgcctgtcgttattctcattctacagttgtctagtatctgtaaattcagaatttgtgttttcctactgctgttggtggagttttaaaactacccccaatgtaagaacaagcctccatttgtcaagatattcacctggaaatttaatacaattttatgtttattgagaaaattcaccataaggttgtcttgcaagacttttcttcaacatcaatcaataggacccacaaaaagttaagatttttccactccctattccatttcttcttgcatagatctactacttttcatattactctccatgataaatccaagaaaattttatcacgacaaaattttctaaatgtttgtaaactaatttaggtttcttacagccattcactgtcaccctactgggaccaattaattaactttgacagctaagtaagcacccccttattcatattcttggcttctcattttgtccccgagacaaatccaaaataaatttgtggcattgccctagactcactttgaagttctcaggatccacatgtagcttgtcacagtgcagttcactgagcttggccaaggcagacttgaggttgtctagattcttaatggactctccaaaagcagtcagcaccttcttgccatgggctttgacccttgggttgcccattatggcagaagcagaggacaagttcccaaagctgtcaaaaaatctatgggtccatgggtacacaacaagaagcctgtgaagtggagaaagacaagtagaaatataagggagcctcagaattcttgatttccctagctctttgtaccctaaaaacaattcttaccttcccaaggcttcaccaccaacctcttcaacattgaccttactccacaggccattgatgagggtcttttcctcagcagtaaagttcaccatgatggcaagtctgggaggttgctggtgatcacaggagtgtcagaagcaagtatgtactgctgctagaagtggtggccttttatgcttcacagacaatgttctgaccctttgttctgcattattctttgaagctattggtcagcctgacccgtggtcctcatgggtggagccaggtcatgggagggtcagcaaaaactgtacactgtgtttatgataatgcacattagatatggaggtattctttcttttttggctcctccttcaacaaaaactctctttgttttgcttattctcttttcattttctactctccacatgtaaactcccagtataacgcccatttctcttatcactttttccaacaaaggcacagaaagaggagtttagcccactataggaaaaaaaatccagtctaaaataactttaccgtttagggaaagaatggctataataataagaacaaactcatgaaaaaaggaatttgtgctgtggacacagaaatgccaatattacatctgtttctccttttcttgggatatgtgctttataactctatctcctagatatatattgccccaagtagacaagacttatacatagttgcatctggaggatgaatacagtagcaaaggattgacaatgggtccgaagactcaattccaaaatacaacaacaggaagtgacagtgtagagaagatggatataacaagttcttgttttgtgattctagagagttctctgaccaaacctttgtgaaccttactccgttagtaatattgctttgatctttttccttgcttaatcccatatagatatttctcatctgtgaggtggaactgaaataactttaaactaggcttgtgattcaactgaggaatgagtgagttgattcatcaatatccttgagaaacatttgtggatagtgtttattataactaaaggatggctagtgtgcttgatttctaatctcttcttggaattattagctatctcctacgtattggacctgaaattaaaagcctacatttgtatgtgtttaactgcatccatgtgcatgaaggatagttttacaccatcctatttaatctgcatctggcaagacagttatcattatccaccttttattcaaataaacagaatcacaaaagtgatataactgtaaggtgagagaactgttgaccaagggaggaaggctccagatttggtcacagtttggctttcctatttataggaaagttgtcctccaacctgcctctggtcagttctgcctgcatttcttccttttacctcctctatggcttcttgtgctcctaacccccctaagagtttctcttccaagactttcattttatttagtttagttctgttttattttttacatttgtttgtttttcttgtggggcccaagtgatagtgcctatttttcatttagcaatgtggcttcggtgtctcaaatctttgtgttccaaatttacccagaggatcttctctataacctttggcttgccctggcttttatgatgatttgttatgtgtctaacagccatttctgacatatgagaacacctttgttttactttcttctatgcttacagaagcattatcttgtttaaagtgtccccaaattggcattattacaagtaattgaatctctggccctctgtcagctttttctctacattatcttttgagtacagattctaacccatggccagtatagatgtgaacttatcttctcatggcatagactatttggcagactattacctactaaataatgtatatacataggattgactagaatatggatactttatacatgttaaaatagctacgtttggtgtgatgcaccttcttatgaacacattaagctaacaggatgaccatggtatccatgtcatacagactgaaagtaagcatatctgttacaactagagcataacattttaaaaaatgttctgtgggttcagtttaaagttttcttgcctataatagacagcctaggaaaatgtaactctagggtgagaaagatgttttgattgttcaagtttaagactgaatagacaaaatcagctggctgtcagcttgagtgcatccttgtttcaaaaccccaagtctgagtgtttgcctagcatgtacaaagctctgggaatggattcaattcctatggctgctacaatctttttaaaagaaagaattcaatgctgtgctaattttagatgttattagtatagaaatttttgaagtatactgtttgtagtaaattaggcccttaaacacaagtttttcagtgttaaacaagaaaaaaatagtctctacagttgttcttcatcataaatagttttaaattagaaaaattgtgagtgaagtttctgaacaggaaaaacatgttttgtaattttattaaaagaaatggtcactactctgcttccattttatgtctccattcatattcccagaacagcaataaattagatagagtaagtttcttaggtgttgcattaactaggaatgactacatactaatgacagcaaggtggaatccctgcaggaagccctaaaccttcaaggaacatgcaatggaaaatgtcaaagacactgaatgcatcagcctcatgatttgaagatgagttaaagagagagccatgtctttcttagctagaaatccctcccttttcagttcagagcagacacctgtttgactgacctctggggctatactgaaaaaccagagaagtgtctggcacttaattatcacgagagtttttactaggaagagaaaatagaaaaccatagtcagccaggtattctcttgaaactggtaacctggaacaaagtcataagtgccctattttctcccataacatcacttctctttcttggtttctttggcattttttaaaatgcttttaaaatgttaacattattgctacattgatgtgtagaagtgtaaaacatttaaacaggttctccaaagcagcaaatatatatatatttatattcccatctaaggcaggctacttgggtacttgatcagaaggaaacagatgagtcactggtctaagactactccatttttgttaagctataatttattgtcattatctaaattcaaacaaaacaagccagactgtttattaaccctatttttactttttcattggcagaaagctctcataccttctaggtaaaacaagtttctgcatttttacaatatcctataatagcttaccctatgatctatttatcatctccatggcattcttttttaacttgggtcctagagtaaataaattgtctattttcaggattaaaattctagagaactcttatctttttatgttaaataagctcacctgtgtattttataaatcaagatcaactcaccaaaaactctgacataataaaacacataggcccttttattaggtaggtactttatattttcaatattccccttcattttatactgcttcaatttataccttagggaatagccaaaattctttgttttagctagctaattacattaactaataactggtgaactttattaaaatgtagcccttcttaagtatgcactaattaaatatttgaataatgtctaaaaaagtgttgcctcaaaagccatactgatgtgcagatataagaattctatggctgaatatgattttcaaaagggttttattgtgagattagggtccatccatacttctagcgtgcaaagtgaatttggcaattattttttcactttgattttatttatttatttatttatttatttatttatttatttatttaaaatttttattacgtattttcctcaattacatttccaatgctatcccaaaagtcccccataccctcccccccccacttccctacccacccattcccattttttggccctggcgttcccctgtactggggcatataaagtttgtgtgtccaaggggcctctctttccagtgatggccgactaggccatcttttgatacatatgcagctagaggcaagagctcaggggtactggttagttcataatgttgttccacctatagggttgaagatccctttagctccttgggtactttctctagctcctccattgggagccctgcgatccatccaatagctcactgtgagcatccacttctgtgtttgctaggctccggcgtagtctcacatgagacagctatatctgggtcttttcagcaaaatcttgctagtgtatgcaatggtgtcagcgtttggaagctaattatggggtggatccctggatatggcagtctctagatggtacatccttttgtcacagctccaaactttgtctctgtaattctttccatgggtgttttgttcccaattctaagaaggtgcacagtgtccacactttggtcttcattcttgttgagtttcatgcgtttagcaaattgtatcttatatcttaggtatcctaagttttgggctaatatccacttatcagtgagtacatattgtgtgagttcctttgtgattgtgctacctcactccgaatgatgccttccaggtccatccatttgcctaggaatttcataaattcattctttttaatagctgagtagtactccattgtgtaaatgtaccacattttctgtaatcattcctctgttgaggggcatctgggttctttccagcttctggctattataaataaggctgctatgaacatagtggagcatgtgtccttcttaccggttggaacatcttctggatatatgcccaggagaggtattcctggatcctctggtagtactatgtccagttttctaaggaaccgccagactgatttccagcgtggttgtacaagcttgcaatcccaccaacaatggaggagtgttcctctttctccgaatcctcgccagcatctgctgtcacctgaatttttaatcttagccattctgactggtgtgagatggaatctcagggttgttttgatttgcatttccctgatgattaaggatgttagtgggctatcactggaaagagatgcccattggacaggcaaactttatatgccccagtacaggggaacaccagggccaaaaaatgggaatgggtgggtaggggagtgtggggggggagggtttgggggattttgggatagcattggaaatgtaattgaggaaaatacgtaataaaaaaataaggatgttgaacattttttcaggtgcttctctgctattcctcaggtgagaattctttgttcagttctgagccccatttttaatggggttatttgattttctggagtccaccttcttgcgttctttatatatattggacattagtcccctatctgatttagggtaggtaaagatcctttcccaatctgctggtggtctttttgtcttattgacggtatcttttgcctgaatttggcaatttttgatttggtaatatttgaaatttataaaaaaaaaaagtaaaaatgctatattttagctaggcatacctcttcagcatttagtgtcctaggtggaagttataacttagggaatttcctgaactgtaaactcacatctctgtgggaaaagatatgaggattggccaagtaagaagagattaaataataactaccctgacaatggccagactccatcctttagcaaggtcattcccagtgacattgtgagaaactgagaccctgtgctctttgtccctgaagttggtaatatttagtgattgttcttgccccaaaattcataacacgaaaaagccattctgaaagtaagtcatctgagcctctagttcagtgagtctaaggcatctataaacggaagaagctttcctttttcaggatcctagaccaaggtgccaagagaccaattctcaataatcctgcctcactcaagcctttgttacaatttctgactggaccaattttcttcctccatgttcttcttttttcttcttttctttcttctttcttttattcttgtttatctgtccaggggtgtaaggctttcttttattttatttaaataagtagaagtagaaagaactggtgtttttcttcttctgggacttggggtagtgtcagctgggtggggtcacagactgtggtgacagataagagccagagctgcacagagctgagtcaaggttgaggcctccgtgagattgggggaagccagtgtgtttgggctcctgccttctttgtcccatcattgctccttcatgagtagataagaggtatgtgttatgggagagtgtttgaggatctggcttaggaaagcctgataaatacgtttcatgtaatacatataaaagtgtacagatattgtaataaatgtgaggctattaccaaaattttcaagtgtaccatggcaatataatttatgaagtctacagagccaaggaaataaataaatcacattctcaaaatacaactgagatgcaatttttcaaaaaggaaaacaaacaacccaaaagatcaaaggaggggctcaaaatattataaagcaactaaaaggcttcagagcaaggggtttttaactgttgagtctgatatgtaattaaaaagttagtaattaaggaactggcctaatagaaaactgtagaaaagaacagttccctattggctaccctagagacattttggacctaacatgctttctccagaccatgactctcctttccctaaaggaaatgaataaaagtaataactgagctgttggcacaatgctagtctcataatctattcctttgcaggatgcctgccatgattgcgcacactcatgctcccactaatgcatgctaatttctaaactggagcatgtattagtataagaattttgaggctcaataagcagtaaatttgtgctaacctctatctatacctgtggttattataatcatgacctaagaaataccttggaagttctactagattggaaattagagaaattaaaaatcatctttggaacatttctacatattagaactgtcaaaacaatatcaggcaatatctctcatggatggtaactagtggcttaaaagccatggctttttggctggaagaagtttattttttctttgaagagaggaaactctgatgacagaacaaccagaggaaacacatctgtgcagagaaggcctttggttccaaagcagtggctgtagagtaactaaggagggctaggtgcttccttttcttcctccaaatgcgcatttgtaccccaaaatatcacctgtctttctggggtaattcctacatccctgatgagtacctctcatgttcacaatgatgtgagaatggtagaattcacttaaccagaatttacaatactgattctaacctaaactaaggttctgtgctagattacagggtaaatgtgaacttgccagggaactacctagtacagatccaatgaccctaactctaacaacacaggctattcccccttcctcttctacaccagacttttcataagcttacccagttaaagcaggtcagataaggaaacagggtaccagtgaatgtctgcaatgaattcaagcccattccaaatagcatttcattaacaattgcatagtttatgaacaaaactcttgtgtgtgtgtgtgtgtgtgtgtgtgtactaaaatgtgtgattctgttgcttctaggtatgagtctaaataaactttacatttataaaaaatgatttgttataacatctaataaagatcatgagaagtaatttttaactagaaaataaaatattctaggttatgtcacacagcaaggcagggtccccttttcattgtaatgctggtgtaagtaatgttttcttcaggtagcaaacttattttcttttcaccttccctgtggacttcctcctagagacccagatagcactgatcagtcacagctgaaaacatctggccacacaccctaagcctcagcatgactcagcatgactcagcactgctgtgctcaagctagatgctggctcacaaggctgaacacacccacagggtggggagtggagaactgactccgcctgggcccagctaacctcctctgcccttggacagtggtactgcaataattgagatctagagagagaatatgaagaagtggaaaactagagtttacttaaatcatagatggaagctggaaaaaatgcagaggctcgttaatgtgtaggaagcttaacagtcattcaggaaatgtttgtggaacatcggtaatatgctgatactaacatcaacacttgaggaataagtgatactaacacatgtgacctgtctgccagaagacctggtcaaaattaacagttaatcataattcaagattattatatattctgaactttgtagagattgtaaggttagaaatccatgtctttctcagtgaagatgccttttagaaagtaagggatgacatgtaatacaacgtacagaccataaactgtatttttcttattgagccctttactctctctgttcagagaaaggtgtgggaactagtcaagatgcactgactcagttgatgtagtatagccagaaaccccactgagcaggaacaggcaaggcagcttcctcatttagcacaggctgttctccctttctcttctacacaagacttttcataagcttacccagttaaagcaggtcagataaggaaacagggtaccagtgaatgtctgcaatgatttcaaggcaatttctagttaaactaagccatcaatggtcagcgttttagttggatatagagtgaaggaggtcacaactttagtctaagacctcacgaggcagggacaggcagatctctgtgagtaccagtcaatcgtgatctacatagtatgttccatgatagcatagttatatagtaaaatcctgactcaaaatgaaggaagaaaagaaagaagtaaggaaaggaggaaggaaagaaagaagaaaagaaaaaagaaaggaaaagggcagggactgcttatcctagaaatattacctacttcctctgtaagcttgagcaatttgcttggcttcttcaagttgtaaaacacagaataataatatagcttgtgttttaagcaagagccacaggcaagggaagaggataggattacaaaaactttaaaattacccttgaacccaagtatggttctaggcctttctatttgtgtggccttgaggaatctacttctcccctcaaaatttctatctcacattttacaaaatggagaaagtgaggattagggtttgaatgctggatgtctctcccaggctgtatttgaatacttaatccacaggtggctttacaatttccactatcatttgaatttctaacttaagcagattcataatattgtaaaacaatattgaggtctccaaatacaacttttcaggagatacttaaatataactcattgtacaggaaacttctctatccagcattcctatttagccattttctttttgttttgttttttaattagatatttttttatttacatttcaaatgttatcccctttcctagtttcccctcctaaaatcccctatcctctcccccctgctccccaaccagcccactcctgtttcctggccctagcattcccctatactgggacatagaaccttcacaggaccaagggcctctcctcccattgatgtccgactaggccatcctccattacatatgcagctaaagccacaaatccttccatgtgttttctttgattggtggtttagtcccagggagccctggtcattttcactctctattcaagttctcttcttcctagaatttcacgagataatgtgaagtgtctaagattagcctgagaggaacaatgccagctgacttttgaacaacagctgagagcactgtcctgacaagaatgtctataggactggtattgggttcttccatactcactgaagatgagactaatgagatgaaacacaaagctatttttgaagctgttagtatatggagtaaaatatatactagtaagacatgaggttattctattgtcagactgtgcaaatagagggtctagtaatattttgtcttaggtcgagtattcctattgtaacaacacaacatgctgcctctcttggcttattaagatctttggacctgaccagaggtaaaatgtcacagaggtgtgcactgggtgggtagatttatatggtttgaagataatgaggctttaagttaatgtcaatgaatgggaagtcagttttaggacaaaaattagtgatggaacttaatgcatgctcagtctccttaataaaatttgccagttggccaaaggcttataaggcaaattgagcatccatgacttccagttttctcaaaaaaaaaatttaaaaaaaggtacctataaataatcatctgaaaaatctctgttattcaagagagtatccttttttattctaggcattttcagcatgtctttaaattttcttctcatatattcctatgagatacagtcatgactaaagaagtagaaagtacaagtatatcttagactctattttttatatatttaatttttaagatgatatttcattttttgaggatttcctatatcatattttgatcatattcaaccctctctcctctataaggccctcccagatctgtttctacctcttcactcctcctaaatttagtatcctgttctatattgcattgaatctttttaataactttattaatccaattcagtcttcccagaagtgtgggaccgtccactggagggaggctgaactacttagaagccacagccttcaagaatggcgtcttcctccctatgaagtcaccagctgtcaatagctcctccattaaagatgtgagcctctctgcactccatgccaaaggattgactggcttgctcttttttataaatgtaattttactatttatttaacacaaagacaattctgcatgctaatgagattcaattgcttgcttctttttatagtaagaatgacagctatccttaatattcagcactgtaatatatacaacatcctcaatgcttttcagctgaaaattttgaatattccagtcatgttgagaatgctacttcacacaaacacatggtacaaaaagataggatatgcttatggtcacctggccccacatattcatgaagtaaatgttagaagaagtgattaagaagaagtttatgtttctacttctttgagcccatgataaatgatttcttcatgtcttggtgttaaaggggtattattcagcaggaacagaaatgtccctgtagtatcactttggagagctctgtgggcttctctataccatgtgctcaacaagaagtaatatgctatacatagcacaatagatagtgcactttggttataactaccagttcacatcttatatgttcttagaaattcatttatactattacatttgtgttcctttctcatcaataaagaagacaatgcatttgtgtcgtgaatgctgttgtgagcataagtacattcatgatagtaatttaaattacaatgtagcaactcagtactcaaaacctgtagccgcctgtggccacacaaactagattcctgagtgggaggccggagctgtaagggagagaacgtgaaagaagaaaagaggccaagacagatttctgatcaaggcccaatgtttgctaagagtctgtgcttataaaggggggatgccactccagactttgttgctaagttgttagcactagtctgccctaactgttagtattatgtcaccaattccacaggttgtcagctatctcaggaatatctcaggaagacaggttcagcctctcagtgggtaggagcatcttggagaagagcagtggcaggtgacagaacaatagaaccatctaggttggaaggctccaccccaggtggtctcattctcagtggcagcaaggtctaaatcagcctgcttaagacagggaggctacaaaaatcattggatttagatacacatacctcagagaatttaagtatcgtagaactacaatagcaaataacatatgtaaaaattttaattgagtactattcttaattttcctttag

SEQ ID NO: 521 - DNA, 48 bp, Homo sapiens
agatgcaggataagcaaatgggtagtgaaaagacattcatgaggacag

SEQ ID NO: 522 - DNA, 4048 bp, Homo sapiens
gtaaacagtcaaatggatatttgtatctgaaaaatcaagaatgcaattctaatcatcaagatgcatttttttattttttagttttttaattcatgtgatgtctattcttttttattattcttcaactttattgaggtatcattcacaaataaaaattgtatatatttaaggtgtacaacatgatgttttaatatatgtataccttgtgaaatgattaccacaatcaagctaattaacatacccattatctcacatagttacctttttcttgtggtaaatgcttttaagatctactctcggccaggcccggtggctcacgcctgtaatcccagccctttgggtggccgaggcaggcggatcagcctgaccaacatggagaaaccccgtctctactaaaaatacaaaattagctgggcatggtgtcgcatgcctgtaatcccagctactcgggaggctgaggcaggagatttgcttgaacccaggaggcggaggttgcagtgagccaagatcttgccattgcactccagcctggacaacaagagcaaaactccatctaaaaaaaaaaaaaaatctactctctttgcaaattttaaatatacttacagtacaattaactacagtcacgatgctgtacattagatatctagaatttattcatcccacataactgaaattttataccctttgagtaatagtttcctgattctcccacccccaacccctggaaaccatacctctactgtctgtttccatgagagtgacttttttatgtttcacatatgagcaaggttgtgtagtatttgtctttttgtgtcaggcttatttttcttagttttacatcctccaggttcatcaattctgccataaatggcaggattttcttctttttaatttttttattttcctatttttaattttttgtttgttattgaatcatctgtgtttcttatatattttggatattaaccaaaatatttaagaaatatttggtttgcaaatatgccatttcatggttcacctttcatttgttcattgttttgttttttgtgtggaaattttttagtttgatgtagcctcacttctttatttttccttttgttgcctttgcttctcatatcaaattcaaaaaacggctgcaacgtgaatattagaattttcttcttttgatttctttaaaaatttttatggttttaggtcttagtttaattctttaacccattcaaatttatttttgtttatggtgtaagacaagggtctgatttcatttcattttgagggtttcaccctctcatataataaaattcttctatatacccttctatcatcacttattactgattatatgccttgatttcagaatcttgccaactagattcagaatttgactgggagagaggacaaggaccacttgagactcatattttatttccagaatctagcatctacctacctaggtattgaataagaaaaatgaagttaaggtggttgatggtaacactatgctaataactgcagagccagaagcaccataagggacatgataagggagccagcagacctctgatctcttcctgaatgctaatcttaaacatcctgaggaagaatgggacttccatttggggtgggcctatgacagggtaataagacagtagtgaatatcaagctacaaaaagccgcctttcaaattcttctcagtcctaacttttcatactaagcccagtccttccaaagcagactgtgaaagagtgatagttccgggagactagcactgcagattccgggtcactgtgagtgggggaggcagggaagaagggctcacaggacagtcaaaccatgacccctgtttttccttcttcaagtagacctctataagacaacagagacaactaaggctgagtggccaggcgaggagaaaccatctcgccgtaaaacatggaaggaacacttcaggggaaaggtggtatctctaagcaagagaactgagtggagtcaaggctgagagatgcaggataagcaaatgggtagtgaaaagacattcatgaggacagctaaaacaataagtaatgtaaaatacagcatagcaaaactttaacctccaaatcaagcctctacttgaatccttttctgagggatgaataaggcatatgcatcaggggctgttgccaatgtgcattagctgtttgcagcctcaccttctttcatggagtttaagatatagtgtattttcccaaggtttgaactagctcttcatttctttatgttttaaatgcactgacctcccacattccctttttagtaaaatattcagaaataatttaaatacatcattgcaatgaaaataaatgttttttattaggcagaatccagatgctcaaggcccttcataatatcccccagtttagtagttggacttagggaacaaaggaacctttaatagaaattggacagcaagaaagcgagcttagtgatacttgtgggccagggcattagccacaccagccaccactttctgataggcagcctgcactggtggggtgaattctttgccaaagtgatgggccagcacacagaccagcacgttgcccaggagctgtgggaggaagataagaggtatgaacatgattagcaaaagggcctagcttggactcagaataatccagccttatcccaaccataaaataaaagcagaatggtagctggattgtagctgctattagcaatatgaaacctcttacatcagttacaatttatatgcagaaatatttatatgcagagatattgctattgccttaacccagaaattatcactgttattctttagaatggtgcaaagaggcatgatacattgtatcattattgccctgaaagaaagagattagggaaagtattagaaataagataaacaaaaaagtatattaaaagaagaaagcattttttaaaattacaaatgcaaaattaccctgatttggtcaatatgtgtacacatattaaaacattacactttaacccataaatatgtataatgattatgtatcaattaaaaataaaagaaaataaagtagggagattatgaatatgcaaataagcacacatatattccaaatagtaatgtactaggcagactgtgtaaagtttttttttaagttacttaatgtatctcagagatatttccttttgttatacacaatgttaaggcattaagtataatagtaaaaattgcggagaagaaaaaaaaagaaagcaagaattaaacaaaagaaaacaattgttatgaacagcaaataaaagaaactaaaacgatcctgagacttccacactgatgcaatcattcgtctgtttcccattctaaactgtaccctgttacttatccccttcctatgacatgaacttaaccatagaaaagaaggggaaagaaaacatcaagcgtcccatagactcaccctgaagttctcaggatccacgtgcagcttgtcacagtgcagctcactcagtgtggcaaaggtgcccttgaggttgtccaggtgagccaggccatcactaaaggcaccgagcactttcttgccatgagccttcaccttagggttgcccataacagcatcaggagtggacagatccccaaaggactcaaagaacctctgggtccaagggtagaccaccagcagcctaagggtgggaaaatagaccaataggcagagagagtcagtgcctatcagaaacccaagagtcttctctgtctccacatgcccagtttctattggtctccttaaacctgtcttgtaaccttgataccaacctgcccagggcctcaccaccaacttcatccacgttcaccttgccccacagggcagtaacggcagacttctcctcaggagtcagatgcaccatggtgtctgtttgaggttgctagtgaacacagttgtgtcagaagcaaatgtaagcaatagatggctctgccctgacttttatgcccagccctggctcctgccctccctgctcctgggagtagattggccaaccctagggtgtggctccacagggtgaggtctaa

SEQ ID NO: 523 - DNA, 93866 bp, Homo sapiens
gatttcaccatgttgaccaggctggtctcaaactgcactttacctcaggtgatccgcccgcctcagtctcccaaagtgctgggattacaggtataatccaccgcaccctgcctccttccttcctttttatctgcaccagcctattttttttctagaacccttttatgtaccaatgaaatcaagccttgctggaatggtcggttgtctacccctagttttatactgggaggctactaagaagaacggttgggggaggacaggaaggtgaaggcgctttctggaaaagacccatcctaatgatacatgtgctatgactgcagccccctctctcccctcaggtcagagaatcctcttagaggctgttctgtggtctcagaatgctccctgcccccaagttgccatgtcagatgtttgagggaaatctgatttctgaggacagagctctaggtgtgggttgttttattttggggatggggtgggggtaggagttggccatgggtttgctgcattccaggaagagggaggactgctctcctccgatgagtcatggaagagaaacgtctaatgtttgcaaacgtctccagccaagcctctgctttcttagactcctcccatcccccatccatgcagattggacccccgtgagaagatttaaatgttaaggttgaaggccaaagaggccatggctctactggttgagatgggaagcagctaacagaacgggaacgattgtccagtacctctagactccagcttgcaagacacgggacaggaccttataataggtgtatctgtctcccaaatcaggacatactctgggtggtgcaggaggatcaggtgaaagaactggattttcacaggggccctgccatctgcagagggcctccaatcaacacggcatctgcagagggctgggagatcagagaagccacagttggagaagaagcagaggcgattgcagaaaaggccagggcatagggagtcaggggaggtcttgcaaatgacagaagctgtgatctgtttctttcaggggaagatgaaggataagcgggcttgagagggatggagctagtgggggtgtgctgggagcccacggctgcctcagcctcagccttagccagactgctggagccagatggggttcatgatgcatcttcccagatggaacggatcaggcatgtcagacaagcttctcttaggatacatggtgtcctcctccctccccctatttgaaatcaggagagaatcacaaggtaacttgggagggctgccaacctcctgggatcttttgtgaactatcaggtaactacagcaggatcacaatgggagacctaaacatgcctccaccaacacccccccccctttttttttctattgtgggacatcaagggagcaagctggtcagcttgggaacaaagatcctattctaggaatttgtccacagcaaccctatctgctgtgtgcactgtccttggatttctgccagactgaaacccaacctgcttggggctgctaccactactgtgagagcaacaccctggcacccggcagggaagggagaatcagagaactcatcctataaaattaaaattgcatttaatcactcttctttcttctaccaggctcaggaggccaggccatctctgcattttaagtatttcaccatttaaagtctaagcaccttggggggtgaggaaggagggcaatggaggagaacttttgaaatctttccacaaaaatcaaagaacaaaccaactagagggaaaaatagctgctatatttaaactacattatcccatcagggagctatggttttgagaaccattccacagtactttgtttggcactgctatatgggtttcttttctttcttttttttaagatggcaagatttttttttttcttcagagcagtaattgcaaaggaagcaaaggtcttcactaattaatttggtagatattcactgagcatctgctatgtgcctggcactacactggtcgctgggggcacaaaatagataaggaaggactcaaggtcctcattgcaaataattatcatgcatttattcaagaagttttgattgcatgccttctaagtgcatatgattctattacaggaaagggtcccaatccagaccccaaaagagtaatagaattcaggtcgagtccacagagtaaagtgaaagcaactttattaggaaagtaaaggaataaaagaatggctgctccatagacagagcagccctgagggctgctgattgcccatttttatggttatttcttgatgatatgctaaacaaggggtggattattcatgcctctcctttttagaccatatggggtaacttcctgacgtcatggcatttgtaaactgtcgtggcgctggtgggagtatagcagcgaggacgaccagaggtcactctcatcgccatcctagatttggtgggttttggccacttctttactgcaacctgttttatcagcaaggtctttatgacctgtagcttgtgccaatctcctatctcatcctgtgacctagaatgtcttagccatctgggaatgcagcccagtaggtctcagcctcattttacccagctcctattcaagatggagttgctctggttcacatgcctctgacaatttccattctcctggagtttatagtctggtggaagaggacagacaataaacaagtgacttagggtgattaagtgccatgaaggaaggagtattactcatatgtgcatttgcccatttgctattccttctgcccaagatgctgctcttcttggctctaaattttcaaaggactctgtattattcctggccctccttctgtcactctcaaatgcgagtccatgacccagtcaagtggagatgtcagatcagcagctgagtatatgcatctggacatacaaatgtgtagtcaacaatatgtaggtgggccggcacggtggctcacgcttgtaatcacagcactttgggaggccgaggcaggtggatcatttgaggtcatgcgttcaagaccagcctggccaacacagtgaaatcccgtctctaccaaaaaatacaaaatttagtcaggcgtggtggagcatgcctgtaatcccagctacttgtgaggctgaggcaggagaatagcttgaacacaggaggtgaggttgcagtgagccgagatcgcgccactgcactccagcctgggtgacagagtgagaccctgtctcaaacaaaaaaacaaacaaacaaacccattatgtaggtggagtttaaagcagtgggactaaggaaagattacagataggaagactgccgggtcctaagccctgggacactccaggtttaaagttaagtagaagagtctggacacagtggctcacatctataatcccagcactttgggaggccgaggtgggaagatcgcttaagcccaggaggagttcaagaccagtctgggcaacatggcaagaccccccatctctacaaaaaataaaacaatttagcagggtatggtggcacatgcctgtagtcccagctactcgggaggctgaggtgggaggatcgcttgatcctgagaggttgagattgcagtgagccatgatggtgccactgtactctagggcaaaagagcgagaccccgtctcaaaaagaaaaagaataaagttaagtagaagagggggaggcacagaaaaggaggttgaaaacgaccaaccagagaaggggaaggaaaacccaggttactatactcgagtgatataaagtgctgtttgaggccaggcacaggtggctcagacctgtaatcccagcactttgggaggctgaggtgggcgaatcacttgaggtcagaagttcaagaccagcctggccaacatggtgaaaccccgtctctactaaaaatacaaaaactagccaggcatgttagtgcacacctgtaatcccagctactcaggaggctgaggcgggagaatcacttgaacttgggaggtggaggttgcagtgagccgagatcgtgccactacactccagcctgggtgacagagtgagaccttgtctaaaacaaacaaagtgcaatttgagacttctggggcgctgatgatggaagtgttggagaaggctgctatcatgcaagacttccaagatgagatggaatttgagccttcatcttgaagggtgatagaggttcaccaggcagatccaagcagaaggaacagcctgaggagaggtcccaaggaagggataatgagtcattgtgtcaggagcttggaattggaggagacgtcttggtggatgtgtagcagacgacactgcaaactacagtggaagaatgtagggcatctccaaacagggttttcagtattgtgtgctagttgcatctttttttttttttttttgaggcagtgtctcgctctgtcacccaggctggagtgcagtggtgtaatctcggctcactgcaacctctgcctcccgggttcaagcaattctcctcactcagccatccgagcagctgtgattataggcgcacgccaccacgctcaactaatttttgtatttttagtagagatggggttttgctatgttgaccaagctggttttcaactcctggcctcaaatgatctgcccacctcagcctcccaaagtgctgggattataggagtgagccaccacacccagccctgtggtagttacctctgcttcctccagaccagtgagatctttgactttcctcagtgaagtgaacatttgttgtttggcagatctaacatttgcagctcttctgataacagcagcaggattttcctttgaggctttgttttccagcatgtgtgtcctgaactagcagcatcaacatcaccggggaactcagaaatgcaaattcttgggtccaccccagacctactgaattgagcattctggaggtaggccccagcaaaaggtgttttcagaagccctccaggtgatgctgaggcatgcgtgtgaaaaccaccactgtagggaactacttctttccctctcagttcgtgcagttcagatggcactgaccatagtctttgcttccaggggtgtgcacaaatcccagagaaaatcttaggcctttctctccagcttagtgctccaaaagcactaaactggagaattagaaactggagatgctggaaccatgtctgccaccacctggagagagactgcctgagagtaaaaagcaaaggaaaagctgggcgcggtggctcacacctgtaatcccagcactttgggaggctgaggtgggcgagtcacctgaggtcaggagttcatcaccagcctggccaacatggtgaaaccccgtctctactaaaaatacaaaaattagctgggcatggtgatgcatacctataatcccagctgctcaggaggctgaggcaggagaatcgcttgaacccaggaggtggaggttgcataagccgagatcgcgccactgcactccaacctgggcgacagagcaagactctgtctcaaaacaaaacaaaacaaaaaaaacaacaaaacaaaacaaaacaaaaaccaaaaggaggccaggcgcagtggctcatgcctgtaatcccagcacttttggaggccgaggtgggtggatcacttgaagtcaggagttcaagaccagcgtggctaacatggtgaaaccccatttctactaaaaataaaaaaaattagctgggtgtagtggtgcacacctgtaatcccagctacttggaatgctgaggcaggagagtcacttgaaccccggaggcggaggttgcagtgagctgagatcgtgccattgcactccagcttgggcaacaagagggaaactcaaaataaataaataaataaaaaaggaaagaggcagagctaagaggtggagagagattctcagtgactttgagcacctggatcaagctgttctaaatttggagtctattccctataagtcccttttttataagcataaaatagtgagttggatttttaaccctcggccgtctaaagaatgcttataatcgtgcggtgtacagggaaggcagattctggaaaagacattgtgttaagtttgacaaattctcagatattgaagttatagttcatgggcatgtagaaaaagtggtggtcactaggtgctggtgtgtgttcagtaacacaagccatgccaaagtggatgcatttctgtgaaaagagcactagagtgtggatttggagcctgttacggacaatgtctctgaatcttcctctttttttttgagatggagtctcgccctgtcacctaggctggagtgcagtggtgcgatctcggctcactgcaacctctgcctcccggattcaagcgattctcctgccccagcctccccagtagctgggattataggcgcgcgccatcatgcctggctaatttttgtatttttagtagagacggggtttcaccatgttggtcaggctggtctcgaactcttgacctcatgctctgcctgccttggcctcccacagtgctgggattacaggcgtgaaccactgcgcccagccattttttttttttttgagacgtagtctcactctgtcgcccaggttggggtgcagtgtcacaatcttggctcactgcaacctccacctcctgggttcaagccattctccctgcctctgcctcttgagtagctgggattacaggcacctgccaccatgcctgcctaatttttgtatttttagtagagatggggtttcaccatgttggccaggctggttttgaactcctgacctcaggtgatccacccgccgtggcctcccaatgtgctgggattacaggcataagccaccacgcctggccagtcctctcattaacttcttatggacaaagtagagaaaggcgggtggtagactaatgtctgcctaatcatcttaagtgactttatatgacaacttaaataatgcaggcaattctcatcattctactcaacaagtatgtgccccagaataagagatgacagatgtgacttggttgaacggccttagttctcattggtgtctcagtgaaagcatctgactgtgccagttctgattttggtacataaatggatgttttcatataacatgacccttagatcaagctgactacatcaggcactcaaccaaaagaaaaatgatctgtttcaacactgtgtaataaagtattatagaagataaggaggcagggagtgccttataagattttcactttactgattttggacactgtagtcaagttgatttttataatagttgaacaattaaatacatttgattggttattttcaatctggaatgagtgtctagaagttctactggatagagacatagaagtcatgcttatcaaatttgtatgtaacctgaagctgggacatatagctaaagtatttgaaaatgaagatctcaaaagactagaacagaccctaaacatgggtctagagcatgagaacattcaagtatacacagaagttcagtgcctgggttaaaaactatcaacagtgcaagtgcacaatgagatataccgactgtagtttatatagaaaggactctcttttgagttgactgttagcacaaatctacagtgtgcagcggaaaagatccagcacaaaggtgggcatgacaactcctctgcaagaccatgcccagacttttttttttttttttttttgagatggagtcttgctctgtcgcccaggctggagtgcagttgctattacaggagcatgccaccacacccaactaatttttgtatttttagcagagacggggcttcaccatgttggccaggctggtctcaaactcctgacctcatgtggtccacccgcttggccccccaaagtgttgggattataggtgtgagccacctcacctggccccatgcccagacttttgtattcagtactgggtacctctaggactggatgacaaagttgctgagggattacaaactcatgatctaggaagaagccgggaagagacttttttttttccctagatggagtcttgctttgtcacccaggccagagtgcaatggcacaatctcggctcactgcaacccctgcctcccgggttcaagcaattcttccgcctcagcctccagagtagctgggattacaggtgcatgccaccatgcctggctaatttttgtattttttttttttagtagagatggggtttcaccatgttggccaggctggtctcgaactcctgaccttgtgatctgcccgccttgtcctcccaaagtgctgggattacaggcgtgagccgccgtgcccggctgagaagagactttttaacacagtagatagcttgaaatactcaaagggatctcacaccaaagagggatgaaattcatttggaatggttccagagagctaaacaagatccaatgtatagatgaagttagccaatgggaggtggatccagcctagaatgagactgctttaatgattagagctgtccaaatacagaatggactgccttttacaatctccactgctttacaaggagctgtagagcattgggaagttggctggggcctcttttacaagtcacttatttccactgtccatttctgtctaacttgctttttaaaccagcttgccttttagcagctaatgtcctcctttattaatgcctttgaagttctttaatcaaatcatccatctttctgaatcacagtttctgttttctctccctgtcctcaattgattgaatgtacctgcaatccttgctgaaaaatagagtatttctaaaacctattcttacttttaaaaacccttcttaacaagaagcaagtacaacacgatgcataaaataaattaagcacaagtttatttctacatgagagaaactagatatttctgcctttgggagactgcgtttctgataaattttggcaacccatcaacaacagctttcagagacaccagcaggttgaggaaccaagagcataattgttatgatgatgtctaagggggccaattctgggcttaaaatcacactgtttcagcttaagagagtattccagcctccagtaaatagaaagcttgcagagaacagtctaggagggcaatggcaacgtggtaacagtaccaatgtgaacttgaaccttccttctttctgagaaacctgtaatgctgtctagctttgtttttgtctgtttgttttaaactgactacacttcacagtcattctcatgaggcaggtagttcagagaggccctctagtttatttcacaaattggaaatcaatgaacttgagttcactgaaaatttgctgaggccttcctatgggggaggccctttgcaagtcacttatgggctagggatggtgggactaattcattcattcaaacagcaggcatttaataaatgaggagcatagactagggactgttctttgtactgaggatggacaagatggacaggccctgttcttatggagcttctgtcctagagctccatgagacactaggagacaagcagttaacagctaaaccaaaatacaacatcacaagtaagcactgtgaagaaaactgaccgggcacggtggctcatgcctgtaatcccagcactttgggaggccgaggcaggcagattacctgaggtcagttcgaagccagcctggccaacatggtgaaaccccatctctactaaaaatacaaaaatgaggcaggcatggtggcgtgcacctgtagtcccagctacttgggaggcggaggcacaagaactgcttgaacccaggaggccgaggttgtggtgagctgggattgtgctgctgtcctccagcctgggtgacagagagagactctgtctcaaaggaaaaaaaagaagaaaagaaaactgaaaaatgtgatggaaggtgaattgccgagagtagccactttttaatttatttattatttaattttttttttgagacaaggtctcactctgttgttgctcaggctggagtgcagtggcgtgatcacagatcactgcagtcttgacctcctgggttcaagcgatcctctctctttagcctcctgagtagctgggactaaaggttcaggccaccacgcccagctaatttttttcttttttttttttagtagagatggagtctcgctatattgcccaggctggtctcaaactcctgggctcaagggatcctcctgcctcagcctcccaaaatgctgggattacagacgtgagccactgtggctgggtagccactttagacagcaaagacatctctgaggaggggacatgtaagctgcgatctgaatggaaagagaacgacacaagtgaagaagatctgtgggaagagcattccatacaaaggctgaggtcaggaactcctccagaagctcataattgcaccagaggtgcttacaaccccaagcagtgacagtggcacagaatattcaacatcaaatgcctaagctaatttccaggctgagaaaggtaaaccatccttctcctgcctgcagtgcttctatcggtcctgaaagagacagaggaggtaagggagaagaattggtacgaaatggtgcagagctggtctcagagggcaacaacagccagccctccatgaccacactcccaccgtgcactcacgtgcccctcttgaagcggctctgatcctgtgacctaaccagtttccacctggcttctctcagtgcgttgccatatagtataattttttgtttgtttgtttcgtgtagggttttgttggttcttttccaagtatcaatcaaaactacatgccaacgtccactccttggaaataattaaatgacatgacgtgcctgattttttcagctggtgatgcactgtaatttgcatctgctgaaggaatttatcttaagtcctgaagcccagccacttgagacaactgaggtgatttttctgctctgcttttgctcatgcggatggtgcgttattgttaaacacaaaagtggactaattgcttcattctgcaacctactccgtgaagaaagctgctcttctttgtgaagagaatatgttcatgttttgttcatgaattccatgcaatttcccatccccttgttaagtaatgtagcttctttatattggcaaaattccctttatcttgctgtgacctgcgctttgtcctcccgagcagagcaaatcatctgtggtttaagagcagctttggattcaagtccccttttctcctgtcgagggaagtgagtctatgaaatggccttcatctgaaagccacagcgaagcacctcctagcccaagtctagctgctgtgtggcagctccagcggcgtgaactgtgactgccctgcagacacctatcaagcgctgcgtcagctattaataataaaatcaactcttctccctcccccccgcgaggggggttccctcgtcagggcccagaacccgctggggaagaatcggggctggcgtgcgaaggagctggcggcagggggtgtaggatgcggtgttcccgaggcgacagatgaaggatttgggttgtgtgggaagtgaactgcggaattcctccccttggtttctgaggggggctctgaaggagccagattaggatgcagagcgcagcccgggcgaccgagggcgaggaggcgagccaaggacatcagcccgagggcgcctcgagacgccccgcgtggaccgcgctcccagctcctcggcctcgccttccaaccatccgcccaccggccccagagcagcgtgcccactgtgagcgccccaccctgcgtctgcaggtgggtgggtcagagaaccgcaggcacagaagagggtacccagcttcccctccgccagccccgcgaccgcggcgcgcgcggcctcgatccgggttcctaggggcggcgcgcgggagggggcggggcctgcgcggcagcgtgggcgccaggcgcgcgggaggagggagccgggaggagggggcggggccgcgccgcccgcgccgcgctgggcgctctcggccaatgagcggcgtccacatgccgcggcggcggcgaaaggggaggcagcggccgataaatgctattagagcagccgccgcggagccgtccccgacgccacctccttttccttcgccgcagtttcctccgccgctgtcgggcgtgcggcgctgagggacccgggcgagcgcgccgcgcaccgccccgccggctcgcctccctcgccgcgttccgccctcagtggtctgccgggcgccccctcctccggcccgggcggggcctctgatcgcctcaagagagcggggagggggctcgggggccgcggcctgccctcccggcgggcggctgagggcgagggaggccctcccttctggcgaggggagggagggtgggtcaggagcccccaacccgccctgcggagctcggggccgcgcgaggggcggttgtctgggggagggggcgcggggtgattcagcgcccggcgaggcggaagcggccgcaagaggaggaggggagagcccgtccgcgcctgggctcccggggtggcacgagcccgcggccggagtgcgaggcggaggcgaggaggccgcggggacgggaggcgaggccggccgggcccccgaagccatggagaacgcgcacaccaagacggtggaggaggtgctgggccacttcggcgtcaacgagagtacggggctgagcctggaacaggtcaagaagcttaaggagagatggggctccaacggtaggtgcagggcgctccgctgcaggggcccggcgcggccgggagagccagggaagatggctgaccgggctccacctcgtgggcttcggctccgcgcccgccgacagctgcgggcggagggtcgggccagcgcgccggccccgcgggagagaaaggggctgcggtcctcgcctcgccttccctggacctcttcgcttctcgggccctcgaccttttcggcgcgcaaggctcggaggcttctctccagcagcagccggccccggtggagggagggacgtggcttctgcagctaggttgagcccggcaagacgttttctcgtcccctgccgatttatgaggagtcgaggtcgttggaaggcctctgaccgttcttgtcctacccaaagttacacatctggcagaagtgatgacatcgctgaaaccactcctaggttcaggagcccgaagtgatttcacgcttagggctagacctcaggccattgattacaaagagtgcatgcttccttgagatatcttcgtggtatgccctctgctaaaaaaatcggatattcttatagctaggtctgtgttttaaagatattgatgcttagaattgtagcagttctttttagaaaaacgaagtgctaaaatgtctctctctttttttttttaacctccctcttgacacattgcttgacgaatttctacattctacagagttaccggctgaagaaggtaatcttaacatgctgtttctgttttttttcctctgttggtgtgctgatggtaagatgacagttaaaacacatgtgtttgtttcttacaggaaaaaccttgctggaacttgtgattgagcagtttgaagacttgctagttaggattttattactggcagcatgtatatcttttgtaagtataaaaaaatttattttctttccccccaaaagctgaaagtattccatagataaatcagaaaacaaatgatgtccattgggtgaaaacatatttggagttgcaagctgtgtctctatgtttaaaaacaatctgggcattttaaaattacaaaacaaaacacttgaagccattggtattcagaaaatagatgcctgacatttacagtgtggttaggagttgtcccagagtgtggcatggtcttagaaattcttgtggtttatcagcttttaatatcaaaaagttcttttctgggaagcctttaatgttttgggttcttccattgttatcgtgttgtaagatcatactaagatgatgttggactctttgtagtctgtaaatagaacttacaaaaggaatattccagttgctttcccttcctggtaatggcaaggtgacagttgttcctgacggtgacaagaatgatgacggctgtgatggcacccttgttgaccaaatttggtcactgacctttagggtggtatatttatctaaattggacccctgtcttaagtgattcttaggttgaaagaacaaggtttagtacagttggttctagatcttaaaggaaaaaaaccagcatggtgttttttcttgttctgtgtgtgcttacccacttgagtgctatatggttgctaagaaactagtgaaatgcaaagaactacagcagaaaaagggtgttggggtggcaagtatatttctaggtttttaacttttttttaaatgttcggtattaattttttgttgcattttttttcttgggcagtagattgcttgctagttttcctaaaaatggtcaggaataggacacagatgttcctaattctaatagcatgagatgccttttattcttgaattacgttattcttacaaaaaccacgataagtgaaattcacccagtgcagtacttctttctagttaaaacaaaattgacaaaacttcacggtttcagttcttgtacatatatgtatgcaggtcccagggatcagcctcagtctttgtgagaaccataccatagagggctattttgagaacgaaataaacaaagcagtgggcatttatttagttcagatgaggaaaagattaaatttatacccatcttttaagtagatagtggcagcagtaaataaatttgtggaataatttttacataaatcctgctatgatactttattatgccatattagccaagtattgtgtagccattaataattcagtccccaagaaccttttctgtggttttcattgattaaaatggggacttacatagcaaaccattcagcattctgagtcagtcacaatgtacctctgataaaatgtttcttcttgattgattaaaaaattttcccccagaaaatggctgctgttttaccaattaagggaaatgagtagacccgattaactatagtttatcaatacattgtcatggggcaaaataaatgatacatttggagctagtgtaagatttgtatttaactgggtacataatagcgttggcagttaaataatggggtccgataaggtcattgggaacttcttaaaaattaatcagctgactacaagccagaagcaaaatacatttttactgaattctctgtgttacaagttgaagcagtgtgggaaaccatgccactggtgttactattggggttgcactgggtctgttttttgagtggccagtttgagtgactttatattagcattttaaattaatgatgtgtgtgggttttgtttgttcattttttactttgaagtaattagaggcttatagtttgtaagcatttcaagcaggtttttaaataaatgctttaattttttttataagataggaccttggctttgtggagcattatagagctatattttggagttgaaatttgagctcctttttggtaactgtggagttactgctcaggaaatgaactgtgttacatttttattttatgagttggtaaatagcaaaagaataagtgtttagggagtacttctatagaattaatttgctttggtttgtttgatcaaggaattgcagatataagacctgttgtgttgattttcttcatgtggggttgggtactgctgctgcattgtctttagtgtttcattcctcctgtctgtatcttttaaaagaaagagcactgactctctttttgtgtcagtttattcctattgatgtaacagaaaaaacatggtagaatattcaggtttttttggagaagtgactaggcgattcttatatacatcatgcgtcatcaagtcatgcttaaattaaaaagaatattagtgacttacttcaaatatcaaactaagtagtaaactgttaactatagttaatattttgctgtggcatagaataggaagctatgcttgtgacctgtagggatctagtttaatttgtaatattggccaaagtgtttttttgaaacggtcacttggattgaaagaaataagcttcatcttccagtgcatatgaacattagaaattgcttaatttgacactgaagaccccccctctatcattcactttatcttttcattctcttcttgattaccaactttgttctaaatgtaacacatcgtatggttgcttaactgatgcctgccctttcttctcttttcctgctttgttaagatatttattgagcacctgtcacagacactggggatacagtagtgaataaaacagacagagacccttacctggaggataatactgctgagaaaaataaagcaagggggtttggatatcagagtatgtgaaagggggaacagttttcaaattgggtggtccggaaagttcttgaggaaggtgacatttgcgaaaagatctgaaggaggtgggcattagggccatgttggtctcccatctgtctaaatcataaagtcataattaatatggtaataatttgcataggtttctctaccttccaccgtcgtttcccatgtcagctacttagattgaccctaaaatgctaataaaactttctagactgtggtacttctcaacctttaggttacatttgaccatttgcatgtgtgtgtctcttttcttcctactagacccccttgagttagtgcttttttttttttttttttttaaatgtagatggagtctcactcttgttgcccgggctggagcgcagtggtgcaatctcggctcactgcaacctccacctcctgggttcaagtgattctcctgcctcagcctcctgagtagctgggattacagatgtccaccaccacgcccggctaatttttgtatttttagtagagatggggtttacctttgttggccaggctggtctcgaactcctgacctcaggttatcacctgcctcagcctcccaaagtgctgggattacaggcatgaaccactgcgcctggcctaagttagtgcttttgatgtcacaaaaacttgggtgagtttgtttcagtagaattttctgaaaatacatgagatctttttactgtagtttctcagaagagaatactcaaagcatttgatactggatttgtagtgattttaattttcttctgtatcttttaatttttgattttaaaaatgggataagaagggcaaattactgattggtttaactagtttattcagagcttttcttaaaataatgacttgaaaggtggatttaatagagtactttttaaaaagattgttttctcatgcctgaaagcattgaatgtttttacatagctttatatctggatcagaagggaacgagttctaattcatgcttttttttccgttttattaatgactgaaagtcctcccccagaaattatcgtaacgtttattggtaattctctgtatcattctcgaaatgtttaatttccatttcctctttatttaaaaaaaaaaaaaaacttgatgtaaatttcttcatttattgagcaattgtttgagggcccaaaggcacagtgcaagtttctgagaatactaggagcaaaatgtgcttatgatctttttaagcacttttttctttcgttttctttttatgatactaagagctcttcctattatcacagtgtatagatatctgagtcacaatatcatgactgtctcccagtttacagcagaacgtgctttttaccttggattaaaatttgctttatttggccgggtgcagtgagtggctcatgcctgtaatcccagcactttgagaggccgaggtgggtggatcatttgaggtcaggagttcgagaccagcctggccaacatggtgaaaccccacctgtactaaaaatacaaaaattagccaggcgtggtggtgggtccctgtaatcccagctactcaggaggctgaggcaggagaatcgcttgaacccgggaggcggatgttgcagtgagccgagattgcgccactgcactccagcctgagtgacaaagtgagactccgtctcaaaaaaaaattttttttttgctttagtatacttatcagaagtataatgcagtacagagtgttgtacagtatttcagtgctgtacagagattaatcttgtggataataattgggagatactctatccctactctatttttaacagtttaatgtagttgagtgttcattagcaagtggttactttgaataatactggcacatttgaagcattgaacttgtttgataatgtatgtcccagaagacaggtattattgtatttagcacaaagcaaagggaagaagaaacactgtttatgtccaaaactatggggcagtggtcttctcttttacttttctttgctgctgttcatgaagcttgttaccttttcgctgtcttttttttgagacggagtcctgctctgtcgcccagattggagtgcagtggtgcgatcttggctcactgcaacctccacctcccagcttcaagtgattctcctgcctcagcctcccgagtagctgggattacaggcatgcaccaccacgcccgggtaattttttgtatttttagtagagacggggtttctccatgttgaccaggctggtctccagctcctggccttaggtgatccgcctgcctcagcttcccaaagtgctgggattacagacatgagccacctcacccagcccagataatccttttacacactgtttaaaattttcaattttcctggagatagggtctcctgtcgcccagcgggtaaatgcagtggtgcgattatagctcactgcagcctcagacacctgggctgaagcctgattcttgagcctcccaagtagctgggactataggtgtgagccatcatgctttgcccttttttttttttttttttttttttgaggcagagtctcactctgtcacctaggctggaatgtagtagtggcacgatcatagctcattataacctcaaactcctggtttcaagcaatcttcccgagtagtcaggactacaggcatgccctgccatgcccaactaattaaaaaaaaatttttttttatacacatagggtctcactatgttactcaagctagtctccaattcctggccttaagagattttcccaaagcattaggattataggcatgagccacctcacccagctgaaacagataattctttttttttttttccttgagatggagttttgctcttgtcagccaggctggagtgcaatggcgcgatctcggctcgctgtaacctctgcctcccggggtcaagcgattctcctgtctcagcttccccagtagctgggattacaggcgtccaccaccacactcggctaattttttgtattttagtagagatgggttttcgccatgttggtcaggctggtcttgaactcctgacctcaggtgatctgcccacctcagcctcccaaagtgctgtgattacaggtgtgagccactgctcctggcttgaaacagataattctttatattcaacctgttgtcaaaatttttagaaacattttcccagttccttgtataagtatactttgtataacttctggcaaaccataattatgaactcacattactatagtactataatactgcagtaagggatcttgcgtttcagtaatgtcactcatccagttttcctcccctttctcttaccccatctccctcccagtctcatggtttctgttgtcaatcctctttctccttacacaaggcaagaggttttcttaccaatagatcagaactgtgaaggactgcccgacatgatctgatatggttgttcttcattttgggctgtagtattttaaagtagaggtttgctctgatggtcccatcactgcttgccattgtctttccctttgctctagctatcaggggatgttgctttaagtttgttccccaggctttactgccaagagggaaattcatacccactttaacaaggtgtgaagcttatcttacagttgctaatgcctcactgaccttttggaaaggtcatagttactcttcaagttgagcgatttttctcccccaagagctaattaaagtttcttgtttctgatatgctctccttggcaaatgtttgaaagtctagtatcagagcagctgtgatcctgcatctatcaaaatttataacttcctagagaagttttcattctggcattattcctggccttaacactagaatgccctgttgaaagcatacagtaacatttattatactcattctggttgtctgtttgccctagctcactggacgttggtggtgattggcatctgtcaggacttggtggtcctggtgcctcctgtttttatttttctttttgtcctgctcaaacagatatttcttattcatgccgtcttctaatgagtcatttggattcattattgccataaatcatttggaggagtgttttcatgatttactaagtagatcttttaaagaagattttattatgaaatatgcaaacattttaagcaattttttaattaaaaaaaattcgacctccaagattaaatcattagatgtggttaacactgtttctggattggtaagtttccacaaaaagaggtttttaaatttttaaccacatagaccactctttaccatattcattattcttagtattcattgtggtgagttctctctttttaccacgtttatagttgttggattgggaagtgcagtgtgactcttactttgtagtttttaaatcttaacaagtttatagttgtatgagctaaaagtttaaacctctgccccattttcttggggcagtgttctgtgaccagttacatttttggacttaggttatctctgaagtgctgtgttgctgtataaatgtcatatggaggataacctacaaaatacacttcggatctcccaacagctttgcggttctgaaacagccttcagtagtaccactgaaaagaaacggggaattaactggttttttgtttcttttatagagatgagggtctcgctatgttgcccaggctggtctcaagctcctggcatgaaatgatcctcctgccttggcctcccaaagtgccgggattataggcatgagccactgttcccggcctagaattaaacagtttatatatgctctaaaatttaagtcagtgatcaagttgtttatactgtggatttatgtcacatggatattacttgatatgaataataactaaatgaacatgactgttagatgatcaccttttactttaatcaagaattgaagttttattttttctaaatagatacatataaaatgaatggaatttattccctctccccagattttatttggattctaaaatggaattattacatcaaaagataaggtatttttaagaagtatagttgtttttttgagactgagtcttgctctaacgcccaggctggtgtgcagtggtgcgatctcagctcactgcaacctttgcctcccaggttcaagcgattctcctgcctcagcttcccaactagctaggactgcaggtgtgcgccaccacacctggctaattttttgtgtttctagtagaggtggtttcaccttgttggccagggtggtctcgaattcctgacctcaggcgatctacctgtctcggcctcccaaagtgctgggattacagacttgaaccaccacacccagccatgaagtatagttttttgtttgttttttgagttttgcttttgttgcccaggctggagtgcaatggtgcgatcttggctcaccgcaacctctgcctcccgggttcaagcgattctcctgcctcagcctcctgagtagctgggattacaggcatgcaccaccacacactgctaattttgtaattttagtagagatagggtttcttcgtgttggtcaggctggtctcgagctccagacctcaggtgatccccccgccttggcctcccaaagtgctggaattacaggcgtgagccatcgcacccggcttttttttttgttttgagaccgagtcttgctctgttgcccaggctggagtgcagtggcacgatctcggctcactgccacctccgcctcctaggtacaagtgattctcttgcctcagcctccccagtaggtgggattactgacacacatcaccatgcccaggtaatttttttgtatttttagtagagacggggtttcgccatgtcggccaggctggtctggaactcctgacctcaggtgatctgcccgcctcagcctcccaaagtgttgggattacaggtgtgagccactgtgcccagctgaagtatagttttgactttcaagaattcttatgaacaagacatagccagttgtttatataattgcattttctaccgtttatttctagagaaagaaaatagattttgtctatcataatccctttagtgctagccacttttttttttttttttttttgagttttcgctcttgctgcccaggctggagtgcaatggcatgcagtacactcacggctcactgcaacctttgcctccccaggttcaagtgattctcttgcctcagcctcctgagtagctgggattacaggcacctaccaccatgtccagctaattttttgtatttttagtagagatggggtttcgccatgttgggcaggttggtctggaactcttgacctcaggtgatcgcctgccttggcctcccaaagtgctgggattacaggcctgagccaccatgctcggccagtgctagccactttttaaaaaagtgacattaagcctaaaaagacacattctaacgtgccatttctcttctaggttttggcttggtttgaagaaggtgaagaaacaattacagcctttgtagaaccttttgtaattttactcatattagtagccaatgcaattgtgggtgtatggcaggtaagcaaaaattcctgtactgcaaaatttcaataagttatgtaagtgattagggctgtattaatctttctgttatctgtttttcctgatgtgttgagtaaaaatatgtttgcgggaagtttacatgtattttccctttattccataaattaattgttttctgacacagtctcactctgttgcccaggctggagtgcaatggtgttgtctcggctcactgcaacctcttcctcccaggttcaagtggttctcgtgcctcagcctcccaagtagctgggactacaggcacgcaccaccacgcccagctcatttttgtattttttggtaagagacagggtttcaccatgttggccaggctggtcttgagctcctgacctcaagtgatccgccctcctcagcctcccaaagtgctgggattacagacgtgagccaccatgcccggcctattaatttaattaattgcaaatttttgaccttaatgcatataaactttgcagttaagattgctcattcttcgccaagtgtggtggcaccagcctgtagtctcagctactcaggaggctgaggtgggagggttgcttgaacccaggaggtcaagactgtagtgagccatgatcgtaacactgcactccagtctgggcaaaggagcaacactgtctcagaaaaacattgttcattctttacggtagcaaggaattaaaatgggtgagagaagctgcttaaggaaatgagaatgtgagaaccattatctttatgtctcctagttgcttcctgtgacaaactttaaaagctacatgtcatttttattctccttgggtttttttggtaggtttagctataaaaattgtttccccttcagtgcttactacagactctgagacttaaaattcatgttaagtgttgatcttttaggtatttgacggatataatcacccctttgaggactgaagtagaccttttttttgtttttgttttgagaccgactctctgtcgcccaggcaggagtgcagtggcacgatctcggctcactgcaacctccgcctcccaggttcaagcagttctgcctcagcctccttgagtagctgggattacaggcacctgacaccacacccagctaatttttgtatttttagtagagacggggtttcaccatcaggctggtctcaaacccctgacctcgtgatccacccacctcggcctcccaaagtgctgggattacaggtgtgagccaccactcccggcctttttttttttttttttttttgtttgtttgtttgtttgtttgttttgaccgactttcactcttgttgcccaggctggagtgcaatggtgcagtcttggctcactgcaacctccacttcccgggatcaagcaattctcctgtctcaccctcccgggtagctgggattacaggcacgtgccaccatgcccagctaacttacttacttttaatagagatggggtttcattttgttggtcaggctggtctcaaactcctgacctcagatgattccccctgccttggcctcccaaagtgctaggattacatgcgtgagccaccacgcccgacacatcttataaacatacttagtcctgttgaaattgtaaacttctaatctttaccaataaatgttaacgatctttatgtggtaggttcatagaaagatggcctacttagagatttgtaattgtgccatatatatgtgtgtgtgtgtgtgtgtgtgtgtgtgtgtgtgtgtgtatatatttttttttttttttttttttttttagatggagtcttgctctgttgcccaggctggagtgcagtggtgtgattttggctcactgcaacctccgtcttgtgggtttgaacaattctcctgcctcagcttcccgagtagctgggattataggtgactgtcaccatgcctggctgttgttttttttgtttttttgagacagagtctcactctgtcacccaggctggagtgcagtggcatgatcttggctcactgcaagctccgcctcccgggctcacgccattctcctgtctcagcctcccgaatagctgggattacaggtgcccaccaccacgcccagctaattttttgtacttttaatagagacggggtttcaccgtgttagccaggatggtctcgatctcctgaccttgtgatccgcctgcctcggcctcccaaagtgccgggattacaagtgtgagccactgtgcctggccttcttcttatgtttttctcaaaaaaattatatttggtcagggcatggtagctcatgcctgtagtatcagcagtttgggaagctgaggcgggtggatcagttaaggtcaggaggtcgagaccagcctggccaacatggcaagtccccgtcgctactaaaaatacagaaagttagctgggtatggtagcatgcgcccccagctacttgggaggctgaggcagggcttgaacctagggggcggagtttgcagtgagccgagatgatgccactgcactcgagcctgggcgacagagctagacttcgtctcagaaaaaaaagattcgagtttttaaaaaaagaacattcttaagtctttagtatactgaatggtatgagcagcaatagagggttgtggccttctgaaagtaaggaaaattataatgacagtataaggtagtatgaggggcatagtcttttatttctgaccagtgtcatcaaggagggctttattttttttaagacggagtctcgctctgtcaaccaggctggagtgcagtggcacgatcttggcccactgcagcctccacctcccggactcaagagattctcccacctcagtctcccaagtagctgggattacaggcgtgcaccaccacgcctggttaattttttgtatttttagtagagacagtttcaccatgttggccaggctggtctcgcactcccaacctcaggcgatccgcccacctcagcctcccaaagtgccgggattacaggtgtgagccaccatgcccagccttttcattgattgtaattgtcatctttgttctcagggtcagagataatttatcttttttttcccccaagacagcttcactcttgcccaggctggagtgcagtgtcataatcacagctcactccaatctctgcctcgcaggcttagtgatcctcccacctcagcctcctgagcagctgagactgcaggtgtatggcaccatgtcaggataatttttgcatttttcgtagagacactgtctcgttatgttcagcccaggttggtctggaactcttgggctcaagcagtcctcttacctcagcctcccaaaagtgctgggattacaggcatgagctactgtgctcagctgataatttaagcacatgcaaaatacagtgctcatgggatatttgtttaaccttgagcagtccagttaaattccacccaacatgatcttgaagggtaagaatgtctgatatgagattgaaattaactttatcatgaatttcccaattaaggtttttttatactttttctggggtatatacatcaaaactgaggtacacgtgttaccagctttcatctttgtgtcatttgattctctttaggctggtttgattctacaacttccattctgaaatcgggaagaaaattactgtgacttctaacggttgatagttcatatatgatgtcatgagaaatatatagcttgggactggcagtgctatgatgagagtccagccattcattggtctttacaactggagggatagttcttagaatttgtgagagatactcatcactcatagcatttactgtgtgcccaaacacaatctaagcatgttacatatgacttcttatcctcacaaaccttgaggtaggaactgttagtgttgtcattttatagacagtaaacttgtgtgttgtgtaacctctctacagtgacatagctgttaagagcctgtattgaacctgggcagcttagcccagagttgggttgggttggggttttttttgttttgttttgttttgtttttttgacatagtctctttctgttgcccaggctggagtgcagtggcaggatctcgtctcactgcagcctccgcctctcgggttcaagcgattcttctgcctcagcctcctgagcccagactattaagctgtactgcctctcatgagacagaattgattttaaatggcagggggatttggctaaaggtgaaagctgtgttttacagtcttagggacagcagagtctgtaattgcttttcctcattgttttatccccttagcttaattgagggtacttaacgtttcgtttttaatacaaattaataaatgtccttgtgtctgttgccttagatgtgaattgtttagtacaaatgttactggtgggcttcctttctttttaaagattagacctctaacattttattccttgggttagaaataattgcagtgtcaggcaggtctttactactcttctgttttcttttatacaggaaagaaatgctgaaaatgccatcgaagcccttaaggaatatgagcctgaaatgggcaaagtgtatcgacaggacagaaagagtgtgcagcggattaaagctaaagacatagttcctggtgatattgtagaaattgctggtgagttgagtttgtcatttttcttttattctagatagtatttctgaatgtagtccttttctcaaggctcataattatatttaaaataattgttttcatgtatcaattaacacattttattgccattcatacaaatcctacattctctaaaattattttgaaatgttttagcacctcccttcctgtcattgataaggcttttggtttttgtttttaaacaaggtattttgaattctacttgtttaaatacattgtagaacacaagtgctagagaggtaaaacctaatgttgatttgacagttagttatagtgaacaatttgttagaatactggctaatgacgacacagtttttcctgttttgtttcttggcaccaaagttcatggtcaagggtaatttcttgactctgaaagctatgcttggccaggcttggtagctcacgcctgtaatcccagcactttgggatgccgaggcaggcagatcacgaggtcaagagattgagaccaccctggccaacatgaaacctcatctctactaaaaatgcaaaaattagccgggcatgatggtgtgtgcctgtagtcccagccacttgtgaggctgcagcaggaagaatcgcttgaacctgggaggcggaggttgcagtgagctgagatcgcaccactgcactccatcttgatgacagagtgagacttcatctcaaaaaaaaaaaaaaaaaacagtatgcttaaaaatacttatgtgttacactgagccaggagtctctgcctgaattccagagatagcttcaaagagtccatgaatccactgtgagtccagaatgctccacagacctccaagggtcagtatcctcactgctgtagattagtgctgtttttttgttttgttttgttttgttttttgagatgggagtctcactctgttacccgggctggagtgcagtggcatgatctcagctcactgcaacctccacctcccaagctcaagcgatcctcccactttgccccccaaatagctggtaccacagatgcatgccactacactcgcctaatttttatattttttgtagagagggagttttgccatgttgctcaggctagtctcaaactcctgagctcaagtgatcctgccttagcgtcccaaagtgctgggattacaggtgtgcccagcagccatatttctgacagtccaaaatcacaacacccctgggaccaaccaggatagtctaggtgggttgtttgttttggctatttcacttagagagtcattgcatactgttattcagattatctggcttttcatacccttctgagttaagtatactatttactttgttgctatttgtgaattatctcatagtaatatgcttttatattgacttgggaagggtgtgctttgtctttattgtcttactcattttaatgaattgaaagagctgcattccttaacccatgctctacaactttggcctctgaaaggaaattgccttgtcctattctctcatccagaaatttttgttgttcctccagaaaaaaaggatagtgttacatatatgccagtaagccaattatttgggactgtgtagtgtttgtgtgtaaatggtgtgtgtaaatgatttaacagcttccttaagtatagtgttaagaagagtacaactcagaatgaaatgtcttggctattggattttttaaaacttcctgttttggccaggcgtggtggctcatgcctgtaatcccagcactttgggaggctgaggtgggcagatcatgaggtcaagagatcgaaactatcctggccaaaatggtgaaaccctgtctctactgaaaatacagaaatcagctgggcatggtggctcccacctgtagtccgagctcctcgggaggctgaggcaggagaatctcttaaacccaggaggcagaggttgcagtgagccgaggtcgtgccatttcactgcagcctgggcgacagagccccagactccatctcaaaaaaacaaattttctgttttgacacaaatgttatactatcacagatgtattattttttcactctgtatacacacatttttgtatgaactgttgaagggtatattgcaggcatgatgcccctttaactcctaaataacatttgttttatagtatcaaggatgttctcttatataacctcagtatgattatcagaattaggaaattgatgcaatagtatgtaagatcttattcagaatttaccagttatcactttttttgatgaggggaagacagggtctcaatctgtcacccaggctggagtgcagtggcaccatcacggctcactgcagcgttgacctcctgggctcaagtgattctcccacctcagcctcctgaataactgggatcacaggcatgagcaaccaagctcctagctaagttttgtatttttttgtagagatgggtcttgccctgttgcccaggctggtctctcaaactcctgggctcaggcagtcctgcctcagcctcccaaaatgctgggattacagacgtgagcccactgcgcctggcccacattttttttaatagcaaaaaatatttgaattagggaattctgatggtgatgaagaaaataggtcagaatggggaaggctgaagatatagggaggctattttagtagtctaggcaagagataatgaggacagtaacattaagaataatgaaggaaagatttttgagttcatgaatagtggctcttaagcaggagtgcacatcacaatcatctgggggcactctttttaaaaaagtttttggcaggtctcaacctagaatattaactctgaatctccattgggtacagagttctgatcgtgagtagttcaaagagtgagcctctgacttagttacaaaacagcagatttgttttgttttgttttgagatggagtttcgctcttgttgcccaggctggagtgcaatggcaccatcacggctcactgcagcattgacctcctgggctcaagtgattctcccacctcagtctcctgaaaaactgggatcacaggcatgagccaccatgtacctggctaagttttgtattttttttgtagagatgggtcttgccatgttgctcaggcttgtctctcaaactcctgggctcaggcagtcctgcctcagcctcccaagtagctgggattacaggcatgcgccatcatgcccagctaattttgtatttttagtagatgtggggtttctccatgttggtcaggctgatctcgaactcccgacctcaggtggtccgcccgcctcagcctcccaaagtgctgggattacaggagtgagccaccacgcacggcctaaagcagctccttccgtcagtctgtccgtccgtctgtccttccttccttcctccccctttccctcccctcccctcccctcccctcccctccttctgtcctccctcttttccttctttctcgctctctcttttttttttttttttttttaacttggagacaggggcttgctctcttgtccaggctacagtggagtagtgtgatcactgcgacctcgaactccttggcttcaagggggtcctcctgcctcagcctcctgagtagctggtaatacaggcacatgacaccatgcccagcttttttttttttttttttttaaagacggaatcttgaactgtcgcccaggctggagtgcagtggcacgattgcggcccactgcaagcttcgcctcccaggtttacgccattctcctgcctcagcctccccagtagctgtgactgcaggtgcccaccaacactcccagctaattttttgtatttttagtagagacagggtttcactgtgttagccaggatgacctcgtgatcctcccgcctcagcctcccaaagtgctgggattacttacaggtgtgagccaccatgcccggcctttttttttttttttttttaaagtaaagatggggtcttgctttgttgtccaggctggtcttgaacttctgggctcaagcgatcctcctcctcctgccttggccttccaaagtgttgtaattacaggtgtgagccactgtacctggctcaaagcaacagattttgataatagataggagagtgtgtaaatcaaagatactggcaagatttctagtttacgtgactgggtgtgatgatggtactctactacctacagaaggaaacattggaaaggagattgtttttccacaaatatatgtggtgggtgaggttgtagatgacatcacctaaatatgtgtatgagattctgtttgattttatgcttacagtttctccagcttcttcttgtttaatttttttaaaaaaatagagacagagtctagctatgttgcctaggctggtctcaaactcctggcctcaagtgatcctcttgccttggcctcccaaagttctgggatttacaggtgtgagccactgtgctctgccttgttgggctgttttagtgtgttgagtctacttgaagccttagagaaattacccccaaagcctttatccttagtttgcatcagtagatggcaatggtagacagcttcagaggaaactacaactgtgatacctcaaagcaccatcctttttgaagaaagagacaaaagccagcttctcttcagttggtgattctggtttctctgtatctttgaatcctgattcttgccagtccttcccgtcttttgtaagacactctaacctaattaactgtgagaaacttggaagtcatcttgattttttcccccctcttatcctctgatttgtccgtaaggccactgattctgtctccagaacacacccaagttcgtgaactccgtttccttggtcagcacactagtctagccatcatctcacaccgcagctgtcatcatctcctaactaggctctggcttcctttgttgtcttcctccagtccattctccacacaagtgccagagtggtttcttaaaggttgtgttatttattcatctgctaaaaaacccttaagggacttccccattgcacttaaaatacaaaattctctgacctgataaacttgcattgtgtgtatgtacctcctgctttcttctatgatttcatcttgtgctgctccttcatgttgcagacatccaggcctttttttcagttttcagtaccaccaaagtcacctttttttggaaggttaggcaaattttatagagtttattaatttgctcaatgcactgatcttatggtggtgaagctttgattattaccctgacctatctcgctttctcacactgaaatttcattttctatattgtaatatagttttgttgttgcatttgatagtttagaaaggacaaataatgtttgatctatagtgtatgtgacttaagattttcagtctaatgggattttccttatttatattgtggtaaagtatacatattataaacttacccattttaaccatttttaagcgtgcagttctgtggcattaagtacattcacattgttttgggactgtcaccatccagaacttttatcttccctaactgaaatgtacaccttaaacactgacttccagttcccctcttccctggcccctggcaaccattccctttatttgaatattcaaaagacaatgaatttaatattcaaaaaaaacctgagtttaaatcccttaggtgaatatactactactataaagtggagtacaaatttaaatccattttcctttcacctgtttctgaatccttcatagatagtgctgattctggtagttatttaccactttttttccccagctcttcccccacagtatggtaattgctaaaaagcgtatatattgctttgacgttgggctctgtttttctttaatttttatttttattactattattattattattattattattactattttgagacagggtctcactctgctgtgcaggctggaatgcagtagcgtgatctcggttcactgcaacctctgcctgcctgttcaagtgattcttgtgcctcagcctcccaattagctgggctcaccagcatgcaccaccacacccagctgatttttgtagttgtagtagagatggggttttgccatattggccaggctggtctcaaactcctggcctcgtgacccactcacctcggcctcccaaagtgctgggattacaggcgtgagccaccgtgcctggcctattattattttagttaagcccagctgtgtgagacattgggctcttaagtgctgcttgctttcgtcttaaattgtgacctttttaactgagtaatgcagaacagacatctaggtttagaatgtatgtgggcattttattaaatactgttgtcatactactaggcagtgagcaccttaaggacagaactgtcatattgactgttgtaacgttatcgtaagttctctatgaatgaaatttgaaatcagaagtatatgataggctcagctaatgtaaacatagttgctgtgcagaacaaacagttgaagtgtatgtgtgtgttcaatacaattattattataatattatacagacagagtcttgttctgtcacccaggctctagtgcagtggtgtgatctcggctcactgcaacctgtgtacctcccagtttcaagtgattctcctgcttcagtctcccgagtagctgggattacaggcttgggccattatgcctggcttgcttgcttttttgtttgtttgtttgtttgtttgttttgagacgagtctcgctctgttgccaggctggagtgcagtggcatgatcttggctcactgcaacctccgactccctggttcaagcgattctcctgcctcagcctcccgagtagctgagattataggcacgtaccaccacgcccagctaatttttgtattttttagtagagacggggtttcaccgtgttggccaggatggtctcaagcccctgacctcgtgatccatcctcctcggcctcccaaagtgctgggattgattacaggcatgagccaccgcgcccagccacgcctggctaatatttttgtatttttagtagaggcagagtttggccatgttggcccggcaagtcttgaatttctggcctcaagcgatccacctgcctcagcctcccaaagtgctgggattacaggcgtgagccactgcacctggccttcaatacaattattgaatgccagattattagtatattcaaggtctgtgtgatcctcattattatcttaattccagaacattttcatcaccctcagaaaaacccatacccattagcagttgttgccctgttttcctcccaccagttcctgacaaccacagtttattatctgttttgtggattactgtctgtttttctggatattgcatataaatggagtcaatcttggtgactggctttctcttagcatagtgttacatttcgttcatgaatatagcatgtatttcattccttactgctgaataatgtttattagttgatggacatttgggttgtttccagttttggtctattatgagtaatgaatagtgctataacttgtacatacatgcttgtactaatttttgtgtgaacataacattttctctctgttaggtatgtacctaagcatggaattatggggcctatagtgactctatacttaacattttgagcagctaccaaactgtctttcagaatggtggtgatattgttctacattcccaccaacaatgtatacaagttccagtttctctacatccttgtcaagacatgtcattgtctatcgttttaaagttttacccaggaagtgagtatcattgtggttttgacgtccgtttccctaatttcttaatgatgttgggcatcttttcatgtggctattgtccatcggtgtgttttctttggagaaatgcctgtttaaattaggttatttgtctttttaatgttgaggtataagaattctttacatatcctgccttatgaggtgtgattagcaaaattttttccccattctatagggattcctttttttcactttcttgatggcatactttgtaacatacaagtttttaatatgataaagtccacttatacattgttgttgcttgtgcttttggtgtgatgtctaagaaactgttgccaattgaaggtcacaaagactttatatattagccagtatatatgatccaggcgtcgtggctcatacctatatgatcccagcactttgggaggctgaggcaggaaaaaccacttttttttttctttttgagacggagtcttgctctgttgtccaggctggagtgcagcgagtggcatgatctcggctcagtgcaacctccgcctcctgggttcaagcgattctcccgcctcagtctcccgagtagctgggattacaggtgcacaccaccacactcagctaatttttgtatttttagtagaaacggggtttcaccgttttggccaggctggtcttgaactcctgacttcaaatgatccgcctgcctcagcctctcaaagtgctgcgattataggcaagagccaccatgcccagcctaggaaaaaaacacttttaaattagccaggcaaggtggtacaggcctgtagtctcactactcaggaggcagaggtacgaagatgacttgagcccaagagtggaggctgcagtgagctactatgatcctgccactgtcctccaccctaggcaacaaagcaagaccttgcctctttaaaaacagcaacaacagcaaaaactatggtgtgaggtaggagatccagctgctttcttttgcatgtggatatttagttgtctcagcaccatttgttgaaaagatttcttcactaatttgtcctgcaacctttgtgaaaaattaatttacaaatgcaagaatgtatttctagactctattcttactccattgatctctgtctttaggtcagtaccatactgtcttgatagctagctgtcgttttgtattttttgaaattgggaacttgggagtgtaactttgttcaagataattttgggcattctgggttccttacatttacatataaatttttaagagttgcttgtcaatttctgcagaaagcaagctggtattttcagtaagaattgtgttgtatctatagatgagtttgggaaatatggtcgtaatatcaagtctttggatccatgagcatagggatgtctgttttttttttgttttttttttttaaggtctgtcatttctttcaacactggttgtcagtgttcaagtcttgtgcttcttttgttattgcatttttggcggggggaatatttgtaattggaataattttttgtaacttgaaattggcctattggtgatatttatttatttatttatttttgagacggagtctcgctctttcaccgctatgacaggctggagtgcagtggcacgatctctgctcactgcaagctccgcctctcgggttcacgccattctcctgcctcagcctccccagtagctgggaccagaggcgcctgccaccatgcccagctaatgtttttgtatttttagtagagacagggtttcaccatgttagccaggatggtctcgatctcctgacctcgtgatccacccgccttggcctcccaaagtactgggattacaggcgtgagccaccgcgcccggcctagtgatatttatttttaattaaaatttttagattcaaggtacatgtgcaggtttgttatgtggatttaatgtgtgatgctgaggtttgggcttctgctgatcctgtcatccagatgatgagtatagatgatgagtatagtacttcacagatagtttttcagccctcgcccctctttccctcccactttttggagtgcccagtgtttattgttcccatcttaatggctatgtgtactcagtgtttagctcctacttacaagtgagaacagacagtatttggttttctgggttaactcacttaggataatagtctctggctgcatccattttgctggaaaagacatgatttcattcttttgcatggctgcgtagtatcacatggtgtatatataccacatttatttttgagatagggtctcactctgtcgcccaggctggagtgcagtggtgcgattttggctcagtgcaacctccacctcccaagctcaagccatcctcccacttcagcctccttgtgagttcaggccatcctcccacctcagcctccttgtagctggaactacagatgcccaccacgcccaactaatttttgtatttttcgtacagataaggtctcaccatgttgcccaggctggtctcgaattcctgggctcaagtgattcacccaccttggcctccgaaagtgctgagattacaggtgtgagccaccacgcccggccacaatttctttttcttgggatatatacccagtaatgggatcgctgggttgaatggtcattctgtttttagtttcttgagaaatctccaaacagctttccacgggggctgaactagtttacattcttgccagcagtgtataagtgttccccccagccccaccacctttttttttttttttttctttttttttgaggcaggatctcagtctgttgcccaggctggaacacagtggcatgattatagctcattgagccatggctttccaggctctagtgaccctcccacctgagccttccaggttagctgggactgtaggcacacaccactatgacaggctcatttttaaattttttcgtagagatgaggtcttactatgttgccctggctagtagttgaattcctgggctccagtgatcctcccacctcagcttcccaaagtgctgggattacaagcgtgagccaccgtgcccagcaataatagtcactctgactggtgtgagatgacatctcattgtggttttgatttgcatctctctactagtgatgttgagcattttttcctatgttgactacttgattgttgtcttttgagaagtgtcttttcataccctttgcccacttttcaacagtgattttgtgtgtgtgtttgtgtgtggatttaagttccttatagattctggatattagtcctttgttgagtgcatagtttgcaattattttctccaattctgtaggttgtcagtttactctgttgatagatttcttctgctgtgcagaaactctttcgtttaactaggtcccaattgtcaagttatttgttgcatttgcttttgaggcttagtcataaattctttgcttagggcagtgttgagaagagtatttcctaggttttcttctaggatatttacagtttgaggccttacatttaagtctttaatttgccttgagttaggaattcttttttcaatttcattttcagattgttctttgctagcgtgtagaaatagttttttacgtattgatcttgtagtttgccatcttgctgaactcattagttagttttaatagtttttatgggttccttaagattttctatatacaagatcatgcatttgcaaatgaaaatgtttttacttctttctagtctggatgccctttatttcttgcctaattgccctggttagaatctccaatacaacgttgaagtaccaagagcagacatccttgtcttactgatcgtaggggaaagcatccagtccttcacagtgaagtgtgacataggtgtgggtctcataggcgggtgccctttatcatgttgaggaagcctagttacagctgtaatatttaggttgtcagtatactctggtgacctttcatggtgtttgtaaacttatatgcaaatcagaaatgatagtttgctgggttactaggaccagcaggtcattgaattgggtaagatataattctaaggcatttgcaactattatatggaacattttggaaaagcataccgtgactgtataacctgggccagataaataggtatttattttattaagactatacacgttgagccttttaaacttccacctcttttagaattagtaatcaaattgactgtgcaatctagcatttagcctgataattcagttttgtgaaaactatagagtgaactttaattctgaattttttcttgtcagtcgaaggtactatttgcgtagcctgaaagattaaatggcataaattgtgcttttagacatggtgacttttatattttcatttacattatgaaattggatgtgaaggggtttttcagatgtgttggaaaactggagagtgttgtaaactaattcgaagctgaaaataaaaaagtactgacttaacgattttgatatttgcagaaaggaacagacctttttgtagtcactgtttggaatgtaagggtcatctcctgactttaaaattctttgtcagcttttggaagatatctggtaggatggttctggctgaacttttcaaagactaagctggaataggtggttttttgagggagatatggagagagagtttaaggaaactaatttttttttttttttttttttttttttttttttttgagatggaatctcactctgtcgcccaggcaggagtgcaagggcgtgatctcagctcactgcaacctccgcctcctgggttcaagcgattctcctgcctcagcctccctagtagcagggattacaagtgcccgccaccacacccggctaatttttgtatttttagtagagacagggtttcaccatgttggccaggctggtctcgaactcctggcctcaagtgatccgcccgcctcagcctcccaaagtgctggaattacaggtgtgagccaccatgcccagccaggaaactaaattttatatgttgctataccagctaatcattccaaagagaaactgggtaagcatacatagcaaatgctaatgtgagtcttaagtatctagaacacaagagccaaatgaaattgatatggcaaataaaaacatggagaaaataacccgcacataggctgtgctcagtggctcatgcctgtaatctcagcacttttgggggaggccaaggcatgcagatcacttgagtccaggagtttgagaccagcctgggcaacatagtaaaaccccatccctacaaaaaatacaaaaattagctaggcgtggtggtgcgtacctgtagtcccaacgacttgaaaagctgaggtgggaggatcacctgagcccaggaggtcgaggctgtggcagtgagctgaaattaagccactgcactccagcgtgggcaacagagtgagaccctgactcaaaaaaaaaaaaaagagaaagtgacccacatgttcacctcttaagaagccacagtaattctacattatcttaaggccaagaaaatatttctccggatggatggaaaccaaaagtagtgaagttgtacataatcttataagaaatgaacgtcattgtttttaagctttctgtattatctgctgacatgaaagtgaatcaagctataatagcctaagtcatttctgttttctttttttctttttccttttttttttttaaagtagagacgggattttaccatgttggccaggctggtctcgaactcctgacctcaagtgatctgcctcccttggcctcccaaagtgctgggattacaggcatgaaccaccgtgcccggccatggttttgtgggatgtttttttgagacaaggtctccctgtattacccagcctagtctcaaactcctgggctcaagggatcctcttcccttggcctcccaaagtgctgggattacaggcatgagccaccattcccagctagaagtcttagttttagaattttggggcttctagtatatgccgcaggggttatttattgacttcttaagaacactgttttcagggttgtttaaaacaaactttatgtatcttggtaacccagggttgatgaatagcaccaggaaataaatattctcagatgacttctgtcttgtagtatatactctggagcgaatcatcttttaagatttaagtagtggaagcaacacaatcttaaaattgcatttgctttagcacttgtacagaaattgataattttatttcctaaaatgaagacttaatagccaacagggtgccagcaatttcaagatttactcgggaataaaaagaataattcttaaacttgacagcaatttaaaggaagaaaactttcaatttaaaggaaggaaacttttacttcagacagttaacatgcagtactgagatttagtagcaggtataaactgcttttgaagcagttgagtaaaaggcagagttgtgaaatagatgagtggattcatataagaacctggattatgatcctagttctgcatgacattggactatgtacattaacctctgcagaattaggtaattggagtactgtttcaaggagctttcttgctctaaaaagtgtgatttagatagtatggccatgagtccatgtggacttttttttgcttttagaaagctgttggggttggaattgactggctttaaacatttagcaaacattaaatgctctttaacacaaaacagagtagtcagtctgctgtagagcagaggagttggcatactatctttgtgggttggttggttggttcgtttgtttatagacatgaggtctcactgtgtcactcaggctggtcttgaactcctggcctcaagtgatcctcctgccttagcctgtaatcccaggtctttgggaggcggaggcgggtggatcacaagatcaggagttcaagaccagcctggccaagatggtgaaacccccgtctctactaaaaatacaaaaattagccgggtgcagtggcaggcacccgtaacccgtaatcccagctactcggtaggccgaggcaggagaattacttgaacccagggggcagaggttgcagtgagccaagatcgcgccactgcactccagcctgggggacagagcgagactccatctcaaaaaaaaaaaaaaaaaaaaaaaaaaacgctgggattataagtgtgagctatagcgtccagctaatattttgggttttgtgggccacaacaatctctgtaccaaagtcttttgtaaaatatgaaaagagaattgtttaaaaaaaaaaaaaaaaaggtgttggctgggtgcagtggcttatccctgcaatcctagcattttgggaggccatggcaggaggatcacttgagcccaggagtttgagaccagcctgggcaacatattgagaccttgtctttacaaaaaaagttttaaaaacttgcatagtgaggctgggagccatggctcatgccagcactttgggaggctgagacgaggttcacttgagctcaggagtttgagaccagcctgggcaacatggaaagaccccgtctctaaaaaaataaaaaatgaaaatttgctgggcatgttgacgtgctcctgtagtccctgcttctcgggaggctgaggtgggaggatcagttgagcctgggaggtcagggctgcagtgagctcagatcgtgccagtatgctccagcctgggtgacagagtgagacagagtaaaactctgtctcccaaaaaaagttcggggggtggggagccttaagattttgcacactgcttagatcaatgtttctctaacttcatgtgtgcaggaattacctggggatgttgttaaaatgtatgttttgattggttcagtctgaaatggggcctgattattctgcatttctaataagctcccaggtcaataatttgagtagcaaggctctagagcagatcttaatcatttctagatcacagtccctttgagaattaatgaaatttatggactttcttccccaaaaacatatattgaaaatcttgtgtgcaacttcaggaggttcatttgtcctcctcctcagaaagtccacctcaggattctagctatttagttttgaaaactgaagtacaggccgggcatggtggctcatgcctgtaatcccagcaatttaggaggccaaggcaggcggatcatttgagcccaggagttcgagaccagcctggccaacactgtgaaatcccatcttcactaaaaatacaaaaattacccgggtgtggtggtggatgcctgtaatcctagctacttgggtggctgaggcacgagaatcgcctaaacccaggagatggaagctgcaatgagcctagattgcacaactgcattccaccctgagggacagagcgagactctgttgcaaaaaaaaaaaaaaaagaaaacaaaacaaaaaagaaaaattgctttagttgttctgtaaatcctggaagctatacctctgtttccaaagccaaggtataaattattactctagaaaacggataagcagaagagcaaaatagtctaaaacaaaaatcagcatagagagtttttgagtttgagagcccctgagcactgtcagaatagctaagacattaagaactgtgagaaatgagagttctcctcaaccatcagaccatgataggccagttgatcttgaagcctgacctgatttcatggggctggcatttccttcctgatttcctgtaatcacctcctctctactccccatgattcagtggtagtcacagtaccaggaagtgccaaccttttcattcttgctactgagatgaagattttggaaaaaggagaagaaaccatgtggtttgggaaccacctttccttttttttttttttttttttttgatacggagtcgctctgtcgcccaggctggagtgcagtggaatgatctcggctcactgcaagctccgcctcctgggttcacgccattctcctgcctcagcctccccgttagctgtgactacaggcacccaccacaatgtccggctaattttttgtatattttagtagagatggggtttcaccatgttagccaggctggtctcaaactcctgacctcaagtgcttcatctgccttggcctcccaaagtgctgggattacaggtgtgagccaccgctgctggccatgggaaccacctttcctaagcattaacaccaaaccacctagatgggcagatttaactgtgaccaacttttatattaaaagataatggaacttttttttttttttttttttttgagacaaagtctcggctctgtcacccaggctggagagcagtggtgcaatcttggaccactggaacctctgcctcctgggttcaagcgattcttctgcctcagctttcccattagctggaattacaggtgtgcaccaccccacctggctattttgtattttttttttagtagagacggggtttcaccatgttggccaggctggtcttgaactcctgacctcaagagatccacccaccgtcagcctcccaaagtgttgggattacaggcatgagccactgtgcccggccgataatggaacttttgaaaaccaagggcttggtggccgggtacactggctcatgcctgtaatcccagcactttggaggccgaggcgggcagatcacctgaggtcaggagttcgagactagcctgaccaacatggagaaacgctgtctctactaaaaattcaaaattagctgggcatggtagcgcttgcctgtaatcccaactacttgggaggctgaggcaagagaatcacttgaacccaggaggcagagtttgtgctgagctgatatcgtgccattgcactccagcctgggcagcaagagtgaaactctgtctcaaaaaaagaaaaaaaaaaaaaaagtaaaacaaagggcttggcattatcagtgccagaaaaatacaagattgagagaatggggaaacaggagggacataaacttggtgggagtatacatttgtatgcaaaagtaaaagataacagacgaagatgttaaccctgtaacaccgtaaaaggaaatgttagaaataactagatagccataaaaatagaggatgattcatttagttcatggtatggttgtgaaatactgtggccttgaacaagtaccttttagtgtctcattttcctcatctataaacagggagggagtaaagataatagatccctccttagagttgtgaagattgaattagtaacctgtgaagctgttccagcagtacctggtctagaaataatagtctcaaaatttcattgcttattattactatacagccactttttaaaatgagacaggtatgtataaatataaaaggtctaatattgttttagtgaatgttgtacataaagagatgtccagaaaatccagaagatacactttttttttttttttttggaaatggagtctcgctctgtcgcccaggctggagtgcagtggcatgatctcagctcactgcaagctccgcctcctgggttcatgccattctcctgcctcagcctcccaagtagctgggaccacaggcacccgccaccatgcccggctaattttttgtatttttagtagagacggggtttcaccatgttagccaggatgatctcgttctcctgaccttgtgatccgcctgcctcagccttccagagtgctgggattacaggcgtgagccatcgcgcccggcaatatactgttaactgtatatatatctgttgaaagaggggaagaagaatggtgtttgaccttttaaacgtgcatttttcttttgtgataaaaatctctgttggtaggtaggctggagtactctaacattgcttagtgcatggttgcctttgcaacatctaatgaattggttacctttctacccccataactctagtaactggaaacttgcttaatgatcagtgtcatttttttagtcagttcattataaaatattccttatgagctaaaatatattttgtctgttgtgtatgttagcttttttaatttggagccacatagaaatctgatttatcaccagtttagatctgaaggggagcttatgaaaccttattttaggggatgagaagactaaaactcagagtttgtaacttatccaggagcatgtggcagtttgtggcagtactaggactgtcaaatgttagcagtatagcgtatcctaaaatttttatttttggccgggtgcggtggctcacgcctgtaatcccagcactttgggaggcctaggtgggtggatcacttgaggttgggagttcgagaccagcctggccaacgtggtgaaaccccatctctactaaaaatacaaaacttagccggccgcatcggcacacgcctgtagtcccaggtatttgggagggaggcaggagaattgcttgaacccaggaggcgggggttgcagtgagctgagatcacgccactgtgctccagcctgggtgacagagcaaacaaacaaaattagcttggtgtggtggtgggcacctgtaatcccagctactcgggaggctgaggcaggaaaatcgcctgaacctgggaggtggaggttacagtgagccgagatcatgccactgcactccagcctgggcaacaaagctagtctccatctcaaaaagtaaaataaaataaaatgtttatttccaagttagtcttagcatttgtttcaaacgctttaccatcttggtagttctctttggtacccagattgaatgcagttatgtaaatggagtctggttgtcattctagacattttttgtcttctgacagtctatggaaatttctttggcagtcttaattactctaccagctaaaactacagtctttcttaggtgttcttcccatccccccattcctaaatttctagacttttactggcatagattattttggttttagtctaaacgtagaatttaagcaactaccattattgaacctcatttagcttaaccaaagctgttatctctttggaccctgattttttattgtttctagcttcgtgatgttcttcaacttggtaattagaagtcttttgctacatgtatactaaaggaaatatgtgtgccaaatgctttattcattgacagatattttatttgacacccactgtgtgccaggtatagtggtagggctaggaaatcagtgatgtctgagtgactctgcctttatggagcttttggttttagtggggaagattcatgaagaccatgcgagtgtaaggaaaggacaggatgctctgtgggcacacagtgagggatgccagcctaatctgggagttagaggaaagccttactatttatgggagaagaaagggtatgtgaaggcccagaaacaagttagaggaactgaagagcatagtgtgtgatgctcagagggaggtgagagggtgacaggcaaacagcacttgggtcatggaggctgttataagcccgggttgggatgccaaagaagctgttgaaagattttaaaacaggaggagatcacgtttgccattttaaagacagtactgtctaagaaacagattgggagcaaaccacagtagtataatggggtattgtgtaatgttccttccctgttcaccgtgaggcctggaagtagtttaaagtagtcaagtagagcttctcaaatgaagaatttcattcagtctctgctaaactacaaaatttatgactcaaattggaaacacggtgaaaattttgagtcacagttaaatgtttaagtagtttaagataaatctgttatgccttgtgtttcctaggagccatttagattcaaaaacaacagtggcatttagaaggtaatttctggtcttaaatagtgtttttcttataaaagattttaataactggtgtttgccacaataaattaggtttttaaaatgcataatacaattgattaataaaaaggattttttaaaaaaataatgctgatttttggtttgtttgggttttttttgagatggagtctcactgtgtcacccaggctggagtgcagtggcgcaatctcagctcactgcaacctcagcctccaagtagctacaattataggcgcccgccaccatgccgggctaatttttatatttttagtagagacggagtttcaccatgttggccaggctggtctcaaactcctgacctcaaatgcttcgtccgccttggcctcccaaagtgctgggattacaggtgtgagccaccatgcccggcttgaataatggtagttttaaccatcagtatttatatttgacataagtggtacaaataatgtttcagtatcatggcttataaacgtttgcatggagttctaaaacgtggcaaactgataatttaatgaactcttacttgaactcttgtgcaagtatactgtgaggattttgttctgattggaaatctttattgtaatagcaaattaaagagctgtggattttcaagagctgaatttgaaaggtgtcagatgttaaatggaaggtaattcagagtttattcttttattgtacctgcctccacccaaagagtcagagaaaaacatttggaagaaaaaattgcagagcatccctttggcaagagtaagaattttccactaccacttgccctaagagcattgacatgcctcaccagggaaatgttacaggatgtgatcatcggaacagcctagcctgctcttcatgcacaaaatcctttgtctgaaattcacagaagcctctccagacaaagggaaattgttgtgtcttcacttgaaaagtattcggtggacctttactttcatgaaccttttaactctaagaacctgttttcctaatagagtcaaccctaaattgactctgatatcaacaaaaggaatgtaacagtcacacagcaagttaaacaaaggttttcattaattgagcttccttagagaaggctacttttacttcctagcctgagttcctgtgcataaaatgaagaggacattggttggtcaagatgatgtgatggtccctctagctaagaaaatactagaatatggcaggttcgttggtttgtttttgagatggagtctcgccctttcacccaggctggagtggcgcaacttcggctcactgcaacctccgcctccaaggctcaagcgatagtcttgctttagcctcccaagtagctgggattgcaggcacccaccaccacacccggctaatttttgtatttttagtagagatggggtttcatcatcttggccaggctggtcttgaactcctgacctcaggtgatctgcctgtctcagcttcccaaagttctgggattacaggcataagccaccgtgcccagtctatggcaggttttttggatttatgtttcttcaatatctttctacaaagatcagtttctaatagaagccaattaaacatagaaactctaaggtagcatatttcccaagtgttgggaggctttggagctttttagcttcgagttggtgtgcctgatagatgagaaacagcacaacagaaaagctgttcataggatccatgactctagctattgcattttttctcttgcattaatttttctagtgtatttgtaaaacctttttaaaaatatggattcttaattttaaaattaacctggtgcaatggcacatgcccgtagtcctagttacttgggaggctgaggtgggaagatgacttgagcccaggagttcaaggctgtagttcaccgtgatcacgccagtatactccagcctgggtgacagagtgagaccctgtctgtaagaataaaaaatgaaaaaaaaaaaaaaaaaaaaaaagtggattcctagaccccactccaaatgcatttaatcatactcttaaagaatctgtaaaagatctccagataactcttcttgtcgtttctaaatatttaattgccacttgattagaatggaagttgtaagatggaaacatttagaacagctgtggtcagtatttaagggtttcccaggcatttgacatttgttcctctagcatttgacatttaaggtattcctcagtatttggccaaaagttaaatgtgtatcaatacagtttctgcacagcaaagaaacacctttcatatattttagtagacctttataaagggaaagagtacatgttggtttccttataatgccagtataaatataatctttcatatacataatatatactatattatatattaatactatatataataaatctatactacacatattgtatatttatactataggaccaataggtaagacctatagtcctgtactacctgttggtcctgtaggtgtatctattagtgttaggtaggaccattactaaatacagtgtgtatatatactaaatatgtatatttagtattggtcctacctaatactgttagataacgattggatatccctaatctgaaaagctcaaagatcagaaactttttgagcaccaacatgatgctcaagggaaatacttactggagcatttcagattttgagttttttgtgtagagatgttcaacagtaagaatataaatcaaacactccaaattttaattttaaaatactgtttccaagcattttgggtaagggatactcaacctgtaatatgttggcagtgttacccaggaaatttaaccttggtatttcttacctgaaaaatacattttctatttatttcaaatcctctgagcttccactgaaacacagcaaaacacatgccaaaacattgcttttgtatcctcttgtaggttgtactcaatttaaatattagatttgttgaccttttaaaatttgtcaagtatatgagagtatgagctagggtttatatattgaattgtttaagtctgttcagcagttacaatgcagaagtaaaatagtgcttatagattgacgaccgctatctcacattggacagaagtcttctactccataggatcatgacattgacgtaaatcaaatcctcagacaccaaaggaacatttggaaataaattttccatttagggtcataatattcatcattgaacttgtcctctttttgaaatgttcgagggcatgtaggatcaggttaatcatgacaggcagaaatagtgcagtatagggcatgttagctgttaaagaccactaaagtttagaatatagttactttgttgtcttaaatcatctgttagatgtactctcttcaatgtagttagagcagaattatattaaaatgaaaggttctcgttgattcagtctgaatattgctgttcattgcacaagcatttccagcaggaatttcaccttagcttgtgtgtccctgcagtcaaatgcaagggtgatctttgcctgttgagattatatattgacaaactgtgccgccttgtgaccacattgcttacttaggctatagcattgtttttatgcactcaaattaaaaaagtaaaccatattctccctgaacttaagctccgaagtagagaaaaatcagaactaatttgaaggtttaagaagttcagtgttggctgggtgcagtggctcacgcctgtaatctcagcattttgggaggcaaggcaggtggatgcctgaggtcaggagtttgagatcagtctggctaacatagtgaaacgctatctctactaaaaatacaaaaatgaggctggttgtggtggcgcacgcctgtagtcccggttgatcaggaggctgaggcaggggaatcgcttgaacccgggaggtggaggttgcagtgagctgagatcatgccactgcactccagtctgggtgatagagcaagactctgtctctgaaaagaaaataaaaaataagaaattcaatgtttacttcttggacaggagtgctattttgccattttgtatatgactggtaacatgcaattcagtatagagagtaagtctgaaaaatgatttgattttaaaatgccatctgcaagtatgggagaattttcttatgtaatttgtagctgccctttcgtaagacttacaaaccaccttaattatctttcagaaaatcacggacagctgttttgttgttattattgttgttttgagacaaagtctcgctctgtctccaaagctggaatgtagtggtgtgaactcggctcactgcaaccgtctgagtagctgagactacaggcacactaccattcctcccagctaattttttatatttttagtagagacaggttttcgccatgttggccagactggtctcgaactcctagcttcgagtgatcctcccgcctcagcctcccaaagtgttgggattaacggacagctgttttaatgtccagctgctttgtgtgattgtgccactcattcagcagtatttgaataccagcagagggctgggcactattctcaaggtgcatggctttgtctgttacttgggctatgttgtggaatttcactttgtacacacatcaaggaaaggggctgagatttgggccttttaagagctattaaagtaacttgttggcctaggaaagaagactcagttgacttaaagatcttcaggttatgcaagaggtttattattcatttaattgatatttctttttttttttatgagacggagtctcgctctgccgcccaggctggagtgcagtggcgcgatctcagctcactgcaagctccgcctcccgggttcacgccattctcctgcctcagcctcccattaattgatatttcaaaaagtatcaaaggatatatgccccagctgtgcagtgttactagtttgctacaccttcccagaggtgtttctttataccattggaagttgtcattttagtatgaattaattacatgttatacgagcatatcaaagggtttgaaacagtgaaagagctaagattaacttggaaataaacattttattttattttactttttgagatggagactagctttgtttcccaggtggtgtgcacctgtagtccttctgcttgggaagctgaagtgggaggtcaagggtgcagtgagctgtgattgcctcactgatctctacatcctgggtgacagagcaaggccctgtctcaaaaaaaaaaagtggtgttactgtgtagttttattttgcatttgccatgtgtttcgttaattgaatatctttttaaagggggccatttgcttcctgttcacaataatttagcttttttgatggaatgaatcatggcatatacaactttattctctttgctgtgccttgtgtatatgtagtaagacttttacttactgctaagtaggaaagtattctttaaagtgaaagcttgaaggcctgtctgaagatacagagcaaaatttcttagaataatgtagttaggtttccttaagcctcattctcttccttcctaattcaaatcttgaatccatctaaagttttttatgactccaagataggttgatcactttgcttgttttaactgaattttatgtatttgtgttatatgcagatcatttattttctttaaaaattgatttggagacaaattcatctttagataacatagttttaaaagttgctcatttcagccgccttttttttctcctaattagttggtgacaaagttcctgctgatataaggttaacttccatcaaatctaccacactaagagttgaccagtcaattctcacaggtaaatatgatatattaagtcattgaatttctgaagaccttcgcatattccatgccaatagagttggctcttgcctcactgtccctttatggtatcccatcttaatcctctctaagatacttatttcttagtgctttagtctcgctccattgcccaggctggagtgcagtggcgtgattgcggctcactgcagcctccgcctctcaggttcaggcagttctcctgtctcagcctcccaagtagctgggactacaggctcctgccaccatgcccagctaatttttgtatttttattagagatggggttttaccttgttggtcaggctggtcttgaactcctgacctcaggtaatccacctgcctcggcctcccaaagtgctgggattacaggcgtgaaccactgcacctggctgccgatacggttttaaaggcatgatttaaaaacaaaacaaaatggctgggcacggtggctcatgcatgtaattccaacactttgggagactgaggcgggcagatggcttgagcccaggagttaaagacgggcctgggcaacatggcaaaaccccgtatctacaaaaaatacaaaaattagccaggcctgtaatcccagctactcaggaggctgggtgaaaagatcacttgtgcctaggtcaaggctacagtgagccatgcttgtgcctctgcactccagcctgggggacagagcaagactctgtctccaaaaaaaagttgtaatttgttcgttaccataggtaaatcttaaggttgaattgttgtctgttttgtggaaagcaaattacttattcgatgtcctttttccaggcaagaaaaatagactccagtgctgtaatttttttcactggaggagtgctaatgttgtatcaatctttacagtatccaaatacacaatgaacaaaagttagcccccataagagatgaaaattgtactacctggaatttgcacaattgtttgaaacattttcccgtttttgtgtgataaaagcacaatctagggtggagggttcatactaactggaagtaagtttgtcagaagaattaactttaaatacaatgctaacttggattaaatagtaaacataaagtctaaaggctctcaagatttatctgattatcaattttgaaaagcagctaatgtcatggagacagttatatgagtaacctggctctattttttttggtattgtttctttataaatagcttacttattaaaattctcattagcaacaacaagctggaggccaattaagccataaaatgttggagaaatggttgggttatatgtgtgaaattctcatagtgtgccctaaagacgtagttgccatttaaaaaaaatttttttttttttgaggcggagtctcgctctgttgcccaggctatagtgtagtgctgtgatctcagctcactgcaacctctgcctcctggattcaagctgttctcctgcctcagccacctgagtgtctgggattataggcgtgcgccaccatgcccagcttatttttgtatttttagtagagacggggtttcactgtgttggtcaggctggtctcgaactcctgatctcatgatccgcctgccttggcctcccaaagtgctgggattacaggcatttaaaaactttttaggctggtcacggtggctcatgcctgtaatttcaggactttgggaggctgcggcagtaggatcacttgtggccaagagtttgagagagcagttatagtctctataatgaaaatctttttttttttttttttaaagacagagttgcactctgtggcccagtggcgcgatctcagctcagtgcagcctctgcttccggggttcaagtaattctcatgcctcagcctccctagtagctgaaattacaggcatgcaccaccacacctggctaattgtatttttagtagagatagggttttgccatgttgtccaggctggtcttgacctcctgacctgaagtgatcgcccgcctcaaacccccaaagtgctgggattacagacataagtcatcacacccagcctataataaaaaactttaaaagtttaaaaaaaaatttaaacttcatagaggttctcgaatattatctttctttcattaagaaatcataatgtagtttttggctaacttgtggaaccaatttttttggtcaaatattgagagtgaagtttgctacctgtaacttaaagtaacatttagagacatattttactcagattgaccctaattatatatctatgacatgatttttaaattgaaatcagctgggcatggtgtctcatgcctgtaatcccagcactttgggaggccgaggtggggggatcacctcaggtcaggagtttgagaccagccttggccaacatagcaaaacctgtctctactaaaaatacaaaaattagctgggcatggtggcacatgcctgtaatcccagctacttgggaggctgaggctggaaaattgcccgggaggcagaggtttcagtaagccaagattgtgccactggactccagcctgggcaacaaagcaagactccgtctcaaaaaaaaaaaaaaagtagttctttatttaccatgcgatctttccagtacacttgctaattgctactccagagcatagccagatgtggcccacacctgtaattccagcactttgaggaggacaagatgagcaaattgtttgagtccacgagttggagaccaccctgggcaacatggtaaaacctcatctctacaaaaaaataccaaaaaaattaacccggcgtggtattgggtgcctgtaatcccagctattcaggaagccaagttgggaagattgcttgagcccaggaagttgaggctgtagtgagttgtgatggtgccattgcaccagcccgggtgatagagcaagacctctgtctcgaaaaaaaaaaaaagtatcagtatatatgttaaagtatttattaaagtatacaacaaatatatgtaaataatacagtcacagtatcagagtataaaatgattactgaaaaataaattaatttgaatagttactccagaaaataatcaatggggattctacttgaaaattcacttttttattttggaattgtgttgatttttatcctgacaccctttgttctggtattaatttccattactaagttttcccagcttacctcctttgaatgaattgggccttttgccaaccttttctcacactaacagtatcccaagagtggtaatgggtgggcatgaatgagaggttctaggttcttggtgtgggtcgcagagatctgttttttctgtctcacaacccgcttaggtgaatctgtctctgtcatcaagcacactgatcccgtccctgacccacgagctgtcaaccaagataaaaagaacatgctgttttctgtaagtactttatgaaatgtgtttttatttacagacatttccaaagcctaatcaaatgttatgtttttcactgccaaccatcactggctatcattctaaaggataatcacacttttcatggtcagtcttaggtgtcagaatatggcagtaacataacgtgtgacttagatgtcttttaattggcaagttttgggggaccaaaaaataatgactagcttatacatcttcaaactcttacctgcaaacatagttgaaaagtagatttgtttggaaaagccttagccaataaagggtattttcaaaatgatgtagatgacagctgctatttgtatgtggttcacaataaaaaggtgcgtgtttagagagagagagaaagcaaacatggcaaaccattaataatggtgagtctaggtgcaaagtatatgaatgttcattttactatttcactttttctattgatgtgaaaaattctttgaatagtgaggaaatgattttaagttggggacatttgtgggtttgtatgagaacctgactactacccatagtaagtaaatagaggtaccctgaaaatagtgaagccatgtccttctcttataacactaggaattaaagtggcatgggagagactgctcacatttgatttctttggtttttggaccctgtcacatgagtaggggttgtcaagatagcccatggggctagttgccgtttctattacagtgagaaaagtaggggccttgagttgttggagccagaagtggagaatgcttagagttgaactatatgagtttgaaaaattgggaacacagaggggttaagagcactgcttgaagatggtctgcaagccgggctcaaatagaaatctaggtgggtcagtacagagctgcctgacataagtaagtagcacatggagcattgcttgttgtcacagttgtatggctggttgcttgaacagtagccagtggaagacctagtagaatgtgtagagaatctgggtgccctagtcaaaaaccagcgtcggtatttaagttgggatgtggtattcatcttgtgaccagttctctacttctgtcctagggtacaaacattgctgctgggaaagctatgggagtggtggtagcaactggagttaacaccgaaattggcaagatccgggatgaaatggtggcaacagaacaggagagaacaccccttcagcaaaaactagatgaatttggggaacagctttccaaagtcatctcccttatttgcattgcagtctggatcataaatattgggcacttcaatgacccggttcatggagggtcctggatcagaggtgctatttactactttaaaattgcagtggccctggctgtagcagccattcctgaaggtctgcctgcagtcatcaccacctgcctggctcttggaactcgcagaatggcaaagaaaaatgccattgttcgaagcctcccgtctgtggaaacccttggttgtacttctgttatctgctcagacaagactggtacacttacaacaaaccagatgtcagtctgcagggtaagaggagtaatttagaatattccgtgtcgtggttctttgttcatcctaccaatatgccttcatgccatcaaaacttttgatttgtaatttcatacatttctgtgggctgtatgtatagcctgagcttaatttctaatatttgagaggatctaatcatttaattcctaaaactttcacaaaatacaggatatctgtatggctgatatacttgtattagatgtaagagaattagagaaattatattttcctttaattaaaaaaaaaaaaagcctgggcgcagtggctcacgcctgtaatcccagcactttgagaggccgaggcgggtggatcacctgaggtccgaagtttgagaccaacctgaccaaaatggtgaaaccctgtctctaccgaaaagacaaaaattagctgagtggtggcgtgcacctgtagtcccagctactcgagaggctgagacaggagaattgcttgaacctgggcagcggaggttgcagtgagccaagatcacaccactgctctcaattctgggcgacaagcaagactccatctcaaagaaaagaaaagaaaaaagacaaggtctcattctgttgcccaggctagtgtgcagtgacacagctgtggctcacttacagcctcaacctcccaggctcaagtcctcccaccccagcctcacaagtagctgcaaccacaagtgcatgccaccatgccccactagtttttttatttttttttgtagaggcaggttctcactatgtcaccaggctggtcttgaattcctgggctcaagtgatcctcctgccttggcctcccaaagagctgggattataagcatgaaccaccacactcagcctcctttctaattttcctgatcctctgtctctaggtgtatgttaatagacaagttctagagaaagctgctagttaacctccctacctgaagtcctaattggtttttctatcacatgttgaatgaagcgtgctttttctcaaaaagtagatagtcatctctctgtattcattagagattggttccaggacctccctcagataccaaactctgcagatgctcaagtctctgaaatgaaatggttcagtacttgcatataaccttgttcatcctccagtatacttgaaaacatctccagattacttacagtacctaacgtaatattataaatgatatgtaaatagttaaactgtgttgtttagggatagttaacctgtgttgtttagggaataatgacaagaaaaaaatgtacatgttcagtacagatgcagttattttttccatctgctgtttagttgaccgtggatgtggaacccacaggtacagagggctgactaaaattgcttttaacttgctttattctgtgtattcatcatatatatttttgtttgtttgtttgttcttgttttgagatggagtttcactcttgttgcccaggctgtagtgcaatggcccgatctcagctcactacaacctccgccttctgggttcaagcaattctcctgcttcagcctcccaagtagctgggattacaggcatgcgcccccacgcccggctaattttttgtatttttagtagagatagggtttctccatgttggtcaggctggtctcgaactcgcgacctcaagtgatccacccgcttttgaaagcctcccaaagtgctgggattataggcgtgagcccccgcgcccggccatcctatattttttgaccatcatttgataaaataaataatttaaacctgctgttagaaaagtaacaactgaataaataatgcaataattatacagctggattattttgtataattcactttccttaggttttgcttaaacaacttggtacaagtctattccaaaaggtacacatgactcatacagagtagacatttgtcacatattttattcggctcattaattagcaagggaatctgtatttgaggaagtgttcaatattagaatattagaatagggattgctaggttagattacaaaactaatgtcttacagggaaacctcatataacatgagcatttatttagtaacacagtgttacattttcctagaatgggcttgttaaataatgcttctgtatgatattgaaagggtgtagttatcttggcctttttgtcaggttttagataattatttttaacatcggaaattgttttataatcagttaagccctgtgaatttttatcttgccaattttaagctcatgatgattttttagatacaggttctccctcccccgcaagctccttgtgaagtccaaacccacatttagaattgacagaactggggtgttccaactttcaaagtggaaagcttctaggtttgtcttaggtttctccaggatattaaggtgtttgagctacttaagttcttattttttggaaccaaaaggttggatgaattggctaaaagtcagttttgtcatactggttgtttcaggaagagaaagggaattttcttatttacgattttgtgtctcacttagcctgaaagctttaattcctcagaatagtctttatgtctgtgaaagtaagccatgtgtaaagccatgtgtaaaattgtaatttttaaaatttcagtttcccagttcactataatttttttttgttcttttctcccttgaatggcttggcttaaaatgttttcttataataaagaaaaagcctgcctgttctgagtgaagctctacctcacaacaggaagctggtgctaattggtattctgcaggaggcttcttgcagtggtattgcataactgcccttgacttaggaagattttcatcctgcatatcctaaatggttgacttgctcacagtcaaaaatgtctaagtacatttagatttagctaatgtagattcagattctgaatgtcttttagaatattttgggctttggtatagactcaaagaatttcacatttttggctgggcacagtggttcacgcctgttatttcagcactttgggaggccgaggcgggcggatcacctgaggtcaggagttcgagaccagcctgactaacatggtgaaacctcgtctctactaatattacaaaaattagctgggcatgttggcaggcgcctataatttctttgggaggctgaggcaggagaatcacttgaacccgggaggcggaggttgcagtgagccgagtcgtgccattgcagtccacccagcctaggcgacagagtgaaactccacctcaaaaaaaaaaaaaagttattttaaaataaagattaactaatttccttattgaatgtgagatgaattgctctgaaaagatgtgtttttaaaacacaacatagctttgttgttgctgttattacggagttttgctctgtcgcccaggctagagtgcagtggcgcaatctcagcccactgcaacctctgcctcccgggttcaagcacttctctccctcaacctcctgagtagctgggattacaggtgcccaccaccacgcccggctaatttgttatatttttagtagagacgggtttcaccatctttgccaggctgatcttgagctcctgtcctcatgatctactcaccttggcctctcagtgctgggattataggcgtgagccaccgtgcccagctcaacgtggcctgtttaacttgagttttacattttttaaattccccttagagaatgatttgatcagattattaattgctcatatttcagagaaagcacgagaaaatatagttttgacatcactttctgtaattttttctttttagaggaggttttacaagttttcatttgcaatgaaaacacaagcctaaatcttacttttccaaactgggcttctgaattataatttgtgaatgcaaatcaagcagtggaaaaattatctttaagaaaatagcttatgtcgctttaaaaaataaaattaatcctttcctaagcatgcttccatctgtattgtctagggaacatcaattcattcagctctgcgggctccttactgtatacatatagttatgcagcttcatagaacatgagctattgccacaataaaaataagtgggaaggagcagagaagcagtttgtcttattttactcgggaaatgtttatgcaactctgaaatgtgagtttattcttcccaagcttttgtgcttagctctaaggcaggactacctaataccactctcacagccagccatttgaaatttgggattctgagcaatctaaagagtaacttgtctctggaactgaccttttgctgaccgggagtcctcataacttggattttgtgtgggttgttgtgtctttggtgccactgctgctcattcattcagcacctcagtgatgctgtttttcatactgttcgattggtcgggggtgtgatgggcgaagcagtctaatataattaagctagttagggtaagggacagtactgctgatgctgagtgagcctcagtgagttttattaaagttgttttcgtaaatgaaagaggttgtttgcctttgtcctaagctaacaaaggtagtttatttgtgtagcattttttaaaaatcccttttaaatactctgatgcgctctccccctacagatgttcattctggacagagtggaaggtgatacttgttcccttaatgagtttaccataactggatcaacttatgcacctattggagaagtgtgagtaaccctcctcctcatttaaaggatctggtgtggcagtttagtatttgtattgatttgcagcatgtctacaaagttaagacagctttctgaatgtggctcaagtcaacacttattactaaagtagtaaatgtttttaaaacaaaaactttgaaagatgaaccaaaggttataatccagtcatctttttgcatcttctgggctccaaactttcaagagggatttgtgtttgttattcactgtagccagtggtggaagaattgaattaagaatttctggtctttttactgattgatttctgataccagagatgcattctctcttttgtttttgtctaatattggctctggcatcaaattgtttggaattttttccagtatgttgtcccagaaattctgttttcattattaaacaattgcgggggggcagggggcgggaggaatcaatagtggcgaccataccctgctctaagagtgttttctctttgggcaggcataaagatgataaaccagtgaattgtcaccagtatgatggtctggtagaattagcaacaatttgtgctctttgtaatgactctgctttggattacaatgaggtaagtctcttcataaattagaaggaatggctgttcctagttcaagggtggggtgggtggaatgaaagtctagcctgccttcctcccttttgaaagtcaagggtgcctgattttgtttcccccttccattcagaacctgatggtggggccagcatgacctcaccaaagaaagctgagagcctttcacatatcctctgtgactgagcattgcagttagttaacttaaagttgtagtatatgtgatgttctttctgttgatagcatacttactataaatgaataaaacccaggatagaaaatgctttcctgaaagcaaaggatatagtttctgtctcaaaggtaagctagtccctgtcagagacagaatgtgaactcttcagaatgataagcagtgacatggaattacattattatgtgaaggcactctttgaattaatagtgtgatcagtggcttcttatatttgggtgaaataataaatactgtgtttgatgtcatcttatatttaagggaaatgaaaaacctacttattagaataagatcacatgcacacctgtactttgagtatgtttttaattatctgggtcacctgtttcagaggaggataaaaatggccttacagtgttgtaatagaggacagattgtgcttttgtggaaaaaaaatattaaagataaatttatctgtgtacttctcccttttttctactttctgtgcctttaaccaatacaggcaaagggtgtgtatgaaaaagttggagaagctacagagactgctctcacttgcctagtagagaagatgaatgtatttgataccgaattgaagggtctttctaaaatagaacgtgcaaatgcctgcaactcagtgagtatttgaacctggtttattgttcatgctgcttatcagtcgtactatatatacttagtgtctgcactgtcctactctcttagaaaactaattataccttatctcctcaaacttacagtatttccttccccatattcactctcaggtaagatgctcttcctgtgtatttgaccaggaaaataaaagcaatcaatagctaatttccttgagcgaccctctgggcccacaggggctgccttctcccatagtgctgtgaacagtgttcttgctcctagcagaagccacctcctcccaacatctttgctgcattattgatttccatctctactagatgttcttcagcatagggggaaataatagtgtctttctatcttgaaactttcctttgaccttatttcccctgtcagctaccacactttcttttcctgttcaattaaaccttttttttttttttttttttgagacagagtttctctctgtcaccagattggagtgccatggcgcgatcttggctcactgcaacctccacctcccaggttcaagcgattctcctgccttagcctccctagtagctgggattacaggcacacgccaccacgcctggctaattttttgtatttttcgtagaaaggggtttcaccatgctagccaggctggtctcgaactcctgacctcaggtgatccgcccacctcggcctcccaaagtgctgggattacaggcatgagccaccgcgcctgggcatcaaacatttcttaactcatttgatgagaccagcataaccaaataccaaaggtcaatgtggtgatggtggtggcagtggcagtggcagtggcagagggcacccacattgttcatgtatacactgaacaaataagtggcctctgagcctttttctgcctgtcagagtctttgagacagggctcattcgaccagcatcactatgacaagggccagtagcaaggatggggagtctccacagtgagttggacctgagtgaggttcctctcaaagagctgctgctccctcctgccaagaccaccatactggacctgtcctgcagtactgcccttagatttctgtggcctcacaagcccggggagcctagacctcagtagaaacactttgcaacggctgctggtgaagaatggccatccattgagtctctagcacctgggtctcctcaaaagactggtccccctgcctgtcacttggctcagcttaagaacttgaagtggaccaggcgcagtggctcacacctgtaatcccaacactttgggaagctgaggcgggagagtcacttgaggcctagagtttaggttgcagcatcactgcacttgagcctgggcaacagagtcagaccccatctcaaaaaaaaattaaggcctgaagtggctaaacttgaaggataactccctttatcttatcctggccaaagtggtagatgattgcttggatgagaagtgatatgcagataagatgttgcaatacacaaagtctgtgtgggtcagtcggtcacgtgggtgccaaggacaggtgggagagaagaagcaagctacagaagcagctcaagaatgggaactgcggaagctgattgtattggaggaaggagtgtgatgctctcagagcagccagggaggagcagaaggagcttagggacgtaagtcaggctctcaaagtctatgtctggttcctgcccccacaaaccaccacccaggaaacatcattcctgagctgtgtggcagcagcagcagctgctccttttatatggcagacagggtgattgcttgttgggcaagagccctcctacactatcttagagtgaataccctctatctgcagtccagggtctgcacagccacatggtcctctaataggtccaccagaccatttgcctgcaaacagcctcatcctcagtgcccactgtctcctagctgtggagcttggattcctatggaattgggttctgctgaacatacctctttttagcatcagacctacctgtctgtcatcaccatggggctgccagtcagtacttttgcagcctctttataggacattgttgtaacttagggttccctggtagaataaggagcgatgggaaggggagaggttctgcctgcctgaaggaacaggtctgggggaggagagaggtaaaactcagccttttctagttgtcatacacagctgtataaaggcaagcctcatttagcaaaatgattagttgtcaccacgtttaatgctttttgtatgtcataagccctttcatcccttcctggataataagggcaaatgaggaggcattgtgtcattggggggtagtacagcctgagttgggagggagcagtatacctgttttcttaataacctcaaatatcaggcattttagtgaccacacaaaatctcagggtgaaaagttctagaccatcatgtccagcctgcagttagggacacctagcccttccatgacctgtatggcgtggtcttccggttagtgtgaggcagcattttgtctcctttatactgtcctgagaaaacaaaactcacactggaattgagactgtctcagctgaaatatagattccttttcagtaaactgatgcacaattcacaaatagcagtctcaaagccatgaaggccttggaccactcctttggcttcttccctctacccatgtgtcttccatgaacccgaagcagtccaggcttattcactctgccagtaagcaaggagttggatcctggcagagccacgctgcctgtgatctattagttggtgtaactaaaaatctgaggcagcctgaaaacagcttcacagattgagggtttgagtcgtttgattctagacctctgactactccactgagtgatgggaaacaagtcatgtaatggggctgaaccagcactggctcactagccagtgaccacacaagtacgggcaatactgtcatccttgtgtctccctgctccagagctcccttgtcccatctttttcacatcccttggccaagggatcggaaacagctgtcatgctgctcattcactaaggagttccaaacacaagctctttgcctcccttcccacttgagacagcaggaacccatgtgtagtttagaagcagagagagcaggtccagcattttggccccatggcttgtttggtgaggtctgtggttcttggccagcctagtactgaaagggatttccctcccccactcccagcccaagacctcttacctgggtaggtccacgccttcctcagaatcattgcgtgttcctttagtcatcccagtgccattggcgcaaatgcttaattgaaactaaacacacgtgtgattgagatgatacagaatctagcgtagcactcatacccattcctttgctgcctgagacggttcagtggctggcaggccagcaggatcgctgcagggccctgagccccatctagtcagttcatcagccttcagtcctcccgtagcttcctaggttagatgctgatgttcttggggatttctatgatgatttttaaatgtgtgtcagtgggagcaaatataattaactcaccacattaaccaaattaaggtggaaaaaacaataaggtcacctcagtaggtgcatatgatgaaacgcatcttatcacaccaaactaagactataaaagtgtgtctttaacgctgacagtgtgtttacacagagaccatgctaacataacagaattctcaccatttctatgcagtattatactggcattcctggtctgtgtaataggcaagaaaagtacaaaaactggaagagaaggggtatctttagttgtaggtaacgatataaagccaaaggtttattctcagtcttcgtcttcctattttgttggtgctgtcactcgctccctctttgaagcacctcttcacttggcttccacgatcccatacttgctctccctccctggcctctcattcgaggtctttgtagctgggtctttcacaaggcaccaggaggtgaaggctccatagtcctcagccatttctgtctatagttactcccatgatctcttctggtctcattactataatcagtagccactagctatctaaaactacttagaatacctaaaaacacttccttagatgccctagccatattcacttaaagtgcttatccatcacgtgtgacagccacatgaacagtggccacagagcattgccatctttcacagagttctggtggacagctctgcttggggccatctcttcacctccaacgttccctagtttaagtcagtgtcattatactgaatggtattccttgtctcccttcagccaatgcttttgttttttgagatggagtttgctctttcgtccagggtggagtgaagtggcgcaatctcatctcactggaatctctgcccccctggctttaagcagttctcctgcctcggcctcctgagtagctgggattacaggtgcctgccaccacacctagctaatttttgtagacagggtttcaccatgttggccaggctggtcatgaactgctgacctcaggtgatccactgcacccgaccaccttcagccaattcttgacaactggagcttgagaccctccgttgtcttctgttttacttgtcttaaaagccaaatgccccataatgacttttgaggtcttaatgacctgcttctaccatcctctgccattacctgcctcaccttttgctcatgtaaactctattccagccacgttggcactcctttaccattccaggacttgccaggttgcacttccgttctctgcctggtgggtcttcaccaccacccactgggttcacacacatcttttcaggccccatggggccatctttattcaaatgtcaccgccttctggccactttatgtaacagttcatatgtatgtatgcaaattttctatcccccttccctttttctctatagcacttgtgttacttttgcatcttagtctgtctctcccaaaataggggacaagtttcatgagggcaaaaacctgtctgttttgtttattgctatattcctagcatctgtcatgtaataggtgtgcttactgcttgttaggtaaaaaagttcagaaattgccacccagtagtatccatatttgttccctttgtaggtcattaaacagctgatgaaaaaggaattcactctagagttttcacgtgacagaaagtcaatgtcggtttactgtacaccaaataaaccaagcaggacatcaatgagcaagatgtttgtgaaggcaagtatggcagattgcaattgagatgttcttgccagggttaagatcccggtgaaccaataaaacaaaattgtttatctaaatctgtaacatttccagggtgctcctgaaggtgtcattgacaggtgcacccacattcgagttggaagtactaaggttcctatgacctctggagtcaaacagaagatcatgtctgtcattcgagagtggggtagtggcagcgacacactgcgatgcctggccctggccactcatgacaacccactgagaagagaagaaatgcaccttgaggactctgccaactttattaaatatgaggttagctaatgaaaagtttctttgtccacaccctgcacgattcattgtgtttaaacagtactccttcaagcaaaaggtcaaacagttctcacttttgccaagaaagaggtgtggttatttgtttttctgcctgccagctgtgtcacccttaaaatttgctgcttcaaacatacatagttaataatttcataaaagtgttattttcaaagtagaatattttcaaagtagaataatcaagatgagcttaagcttgtaaaccccattttgcctctcatctaaatcatgattttttttaaattggtgacatttctagaatattcattagttactgaaggtcaaaagatccaagttggagattacttccacttttctactcagagtagaattcttttatatcaaggatgtgacatcctaaagctatgaacaaaatgaagaagctttggtactgtgggctcagaatagcacaagagttaaagaatggtttgataacgggtgtagtggtatttttttttctcataagaaaatgcaaaaaccgccaggcacggtggctcaaatgcctgtaatctcagcactttgggaggccgaggctggcagatcacctggggttgggggtttgagaccagcctgaccaacatggagaaaccacatctctactaaaaatacaaaattagccaggtgtggtggcgcatacctgtagtcccagctaccctggaggctgaggcagaagagtctcttgaacctgggaggcggaggtcgcagtgagctgagattgcgccatggcactccagcctgggcaacaagagcgaaactccgcctcaaaaaaaaaaaaagaaaaaaaatgcagaaacctgtctcaatgtttaactgggcatttttcaaactaggggacaaaaactagaacttgccacttttatttaaagtgatgctcttattttagaccaatctgaccttcgttggctgcgtgggcatgctggatcctccgagaatcgaggtggcctcctccgtgaagctgtgccggcaagcaggcatccgggtcatcatgatcactggggacaacaagggcactgctgtggccatctgtcgccgcatcggcatcttcgggcaggatgaggacgtgacgtcaaaagctttcacaggccgggagtttgatgaactcaacccctccgcccagcgagacgcctgcctgaacgcccgctgttttgctcgagttgaaccctcccacaagtctaaaatcgtagaatttcttcagtcttttgatgagattacagctatggtgagcatgtttgaacatgtacaggtgactcaggctacacaagcacatagtagcctctaattttgaccactgaatttttttgtcatagctccctaatttggaatttgtcatgatttgggtcttttctctagaattcggtgaatcagtggttagcatgttgtgtgctacttgcagggaagatcctagagtcgtttaaaacccagaagggccttccagatcagtcccagaggaacaatctggtgatctagtctcttttttaaatgagacgtgtttttattgtaagttttctgaaaattgaggatgtaatcagtcagttgtttggatcaccctgcttttaagttctttaagagctggctattgatgaagcatttccagtattcttcccctcacctgattttcacccagatacattatgttaaatttactttcttctcttttaaaaaaaaatcttagttttgaaacatactataagtgtactctcctctcccccagaggtaactgaagttggaatttagcaaaaatattaaaaacatgggagtgctgtttttgtgtctgtagacagtattatttttgcatgcttttgaaggcatattttttggccgagtgcagtggctcatgcctgtaaccccaacacttgggaggccgaggcaggtgaatcacttggggtcaggagttcaagaccagcctggccaacatggtgaaaccccgtctgtactaaaaatacaaaaaattgctgggtgtggtggtgggcgcctgtaatcccagctactcgggagattgaggcaggagaatcgcttgaacccaggaggcgtgcagtgagccgagactgcgccactgcactacagcctgggcgacagagcgggactccatctcagaaaaataaaaatttgcatatttttgcaatctgcatctttctacttgaaatttatccatgtggatacaagtgcttcctcttgactgccacataggttgtgtttttgtttttagtaagataatacagataaatttgaagtcccctttgtcccacttcggtaaacttatttggtaattttacatttcctaggtaaaatgtgttttgtgacaccaacttatgaaacaaaaattctaaaactctttgccaagagacctacggctctattcattttcctcctgcttcccattcagtgggcttttgcctaggggtatgaatgtggcatgccagttggctgacccaaccattgctttccctttcagactggcgatggcgtgaacgatgctcctgctctgaagaaagccgagattggcattgctatgggctctggcactgcggtggctaaaaccgcctctgagatggtcctggcggatgacaacttctccaccattgtggctgccgttgaggaggggcgggcaatctacaacaacatgaaacagttcatccgctacctcatctcgtccaacgtcggggaagttgtctggtaggtctctgtgacagcatcacttactgtacgcctttatctaaatgggtcatggagcccagttctcgcagtttgctctccagattgcagcagctttggtctttgtgcctgagttggaagaggggagtgggcaagacagaaatgccttatggaagcagtggtgctttggccctcgggagggttgtctgcagctgccccaatgtgcaaagaatcctctttaacgtgagactgagctaacattaaccaggtagtcacatgaaattcttgccctccaaaagttggctttatctcagtcagcttaataatttttttatttttatttatttttttgagacagtctcgctgtcgcccaggcttcgggcagtggcacgatctcagctcactgtcccctccacctcctgggttcaagcctcccgaacagctgggattacaggcatgcgccaccactccctgccatttttttgtgttttagtagaaatgaggtttcaccatgttgcccaggctggtctcttaactgctgagctcagccagtctgcccaccttggcttcccaaagtgctgggattacaggcataagccaccgcacctggcctcagtcatctgaatttaagtaataaactaagtaaaattgagctttaattcaaaattgggtataagtattttacagattacctgaagttgttgtcatttatttttctggaggagggcgggttgatgatgctctttaaatagtggccagaagtcatttgggctctctttgtcttcttttcttgattggaaacagtattttcctgacagcagcccttggatttcccgaggctttgattcctgttcagctgctctgggtcaatctggtgacagatggcctgcctgccactgcactggggttcaaccctcctgatctggacatcatgaataaacctccccggaacccaaaggaaccattgatcagcgggtggctctttttccgttacttggctattggctgtgagtacaatttttttatattactgatttttaaacaaaatgtttgtgagctgaaattttgtaaattcatcccttaaaagcgtgttttttcttctatccccgtatagggtagcaaaagacagagatgccctcttacagttcgatgaactatacatccaatttaccagagtcctttcacagttagttccagttttagcatcctgcccttacttgggcttttctgaatgagcaattaaacatcagggttttcagattgagccctctgtgcaaagggataagaatgattcacgctaggttctgccttccaagagttcataggtgggatttaaatagataattgtcaccaagttataaaatttagtccctgtttccataagagaagggttgcgcagtggctggtcccttttatatataaatcatctctttagccctcatcttcctcaccccgggttcttccccatttcatagattgggaaagtgaggtgaaatcacttccctgggatcccataggaaggcattgtgttttcataatatattcacatgacttcaaattcaaaaagcacacaatggcatagaatggaaagggtttgggccagtcacttccctctggcgttgaggtgctcatgtaccctgtgcccttccggagagattccagcatgctgtgcacacctgcatgttgacccttgtcttgccttcttcctgcttgtcagatccttccatatccggacatgcgtagtgcctcatccttgcagccagcggccttcatgctccactgtaattcgtgggttagtgggtatatgcacttgttgtttttgatgctaccacatggggatatttgcctcgtctgaactctgtgtattctctgctgcaccttgttgcttctttgcaataaacttcctgaactcaaagctaatactggggggaatcccagaagctgctgagggcagggccatgctgctcagtgttccaccctagctcctgacagcatttccctagaaaactgctgctgggcctctaatggagcaaataaatctgtgtacaactaggcagcaatagtttgtccaaaagtcctggtgtaatctagtccctcaaactgtgcagccttacatggagtacacacacacttgcagccttgaagtactacccactgaggggagaaggcacggcaaggggaaaggttggcacaggatggagcaagtgctttttctcacacattctggaggaaaagttatccagttcttctgttctagaaacacccctgtccttcagaaaccagggtctagttgctctggctaccaggcgtgagcaggtggtggtagcaccacaggccccggttaccatcactgtcccatgtctttgatcttcgtccttgtggggactggcctgcatggcctcggtggcagcgagccctgcagaggcaagtgcatcagcatcactgtgtttgttcccaggttacgtcggcgctgctaccgtgggtgctgctgcatggtggttcattgctgctgacggtggtccaagagtgtccttctaccagctggtactcagtcacctttctttctgtaccttacatgagaagtgttgtgaggccttgacctttctgtggtttcggtatctatcaaatcatcttaagactcagacaataaacagttacatctaagatgattctgaaggaccagggcttctccgagaaattggggtaaacctcttggctggctctgcattcaggctggtctgtgctaggcttggtatggggttggagcctggacttgggaaatatactgggctgataggaatttgattggattttcttgcagagtcatttcctacagtgtaaagaggacaacccggactttgaaggcgtggattgtgcaatctttgaatccccatacccgatgacaatggcgctctctgttctagtaactatagaaatgtgtaacgccctcaacaggttagtgcaccttcacggcaggctgaggcgagcatggtgactgccagggcaccggggaattgtgtgtagtcacggttgattgaggatcacaggacagttcttcccttcccaaaagaaaggagaacaggcaataccagttttaaaagcatgagctgtcgtcacctccaggaagtagtgggagtgcttagccctgtgtttcttaggagctcttccttaaaagaaaccgtgggggccaaaaataggaactttggtacccctgtatgccagcacccacagggaaggaacctcaccctttcacacagacaaatggtaccatccagttaagcccgtgacaaaaatggaaatttctaaatagcccaagtctccagggcaattgggaacagctttgaacccactaagatggggtctgctatgccaaaacatagatacagaattcacagtttgtcctgcattaggacattctcttcaactttgccactgtagaaagtggaggtaggtcagcggatggtgccacattaacagccgccttactgaagtgtagtccaacagggtcttactgccactgtgacacgtgccttgccttgggggtgcgtttccccacctctccttgctctgcagcttgtccgaaaaccagtccttgctgaggatgcccccctgggagaacatctggctcgtgggctccatctgcctgtccatgtcactccacttcctgatcctctatgtcgaacccttgccagtaagtggttgggtggggcttgggaccagccacctccttccaggggaggctggaggcgtgacacgtcttccctgtgtgtcagctcatcttccagatcacaccgctgaacgtgacccagtggctgatggtgctgaaaatctccttgcccgtgattctcatggatgagacgctcaagtttgtggcccgcaactacctggaacctggtaaagagtgtgtgcagcctgccaccaaatcctgctcgttctcggcatgcaccgatgggatttcctggccgtttgtgctgctcataatgcccctggtgatctgggtctatagcacagacactaactttagcgatatgttctggtcttgactgacagttttccataaagaagatgtttaacttaatcaattaatttttttattgtttaaagcaactgtctatttctgctgaattttcacatgaacatactggctggtgatggaggtttcatactctagattttgttttgctttttctgactccagtggggcaagattttccttttttatacacataattaaagtgtccattgacatgtacagagaactaacactattttatgcaaatatttttttgtagatgaaaaagcatgtacagtgttctgtttaatactcatccttgtataaaaaaaatagttgagccagcagacattgtcagcaaattaattggcagcagattttaggaaatgaatgtgtgtggttttttttctaaaactaaatagcatgtattgtgtcttttgcatgatgatccggatttaatttgatatcacagtctaatttttattcataagccaatttttctgcactgagcagagtcttgctacctcagtcagtattgttttggtttgctacttccctcacccactttggcctccgttcaccccaccccaccccacctctccccaccttacccccgccccgcttggcttcttctttaggattgtgatggttcgttctgtttacatcagttttaacgagaggtatgcctgtactcgcttgtgcagaaaacattgttccagattcaatcgactgggtttatgtcccttcacatagtttttaaggttatttatttaaatgtctaatgtattttattgtaacagacattgttttgccaacattgcctatttcagtggcacgtcatctagttttaaaaaaataaaacattttaaatggacagagaaaaataactgtcttgtctttaactcgtaagtggcttacctgggactaacagacatgtccaactttctctccagttcttagctcagaactttagttgtactctgcttgaggggaagaaggctcctgctctgctgtgtaggtagtcataggaattgtattcttaatgtacaggcactaattgtcatctgtgatgtacattttatgcaagtttctgctggcctggtatagagaacataagggcaagtgtgtatgtgtgtgtatgtgtgtgttttgtaaaatctgtaaatagcacatgaccaaatgaacatattgtatagaactatttttatttgaatgtggcactaaccaccaccaccgttactacgatcaatgtttgcgcatgttcgagatgagtctcaccaacagtgtgtaagtcattaacagtcctaactgtggtgttttcctccaatgccttccaacatccatcaactaacgtgagtattttcttcctgggatttggatgctttagcctaaaggtgactgccaccaagtgagataactgtatgtcactaacttataagccgcctccatggcagatgctgctgtgctccctgatgccctgtgagcaccggggttgcctgtggcgcctgccatgtgactcgggcgcagcatcagctggctggaggtgtggctttcatagacctccacaggctgcctaggacaagatgaccaggagggcccaagccagacaaaagccggagtggggagagaggcatttcagccagaccaacaggctgaaggagctgtgcagactattgctaaaatgagggttcgcagctgccaggagtcatcccagaacattgctacttatttattaaaaagctaaaaactagtgaaagcaagtaactgaaccagtgaactctgggtatcgataggttcgtcttaaataggccacttccccactcccccacccccccttgcttggtcttgtccttggtggctaagacttagctctgcaggggatgttaaagcacagttagtaggacgtggctctgcacagcccaaaaaccagcttactccttagccagggtgtgaggcctcgactatattcttcaaaatgtacttaggctctggttactgggatggccagtagatgtaatgcagatggttggagtttggggagggttaggaggcatcaagcaggacaaggtgctgctgagttcagagggcccacgttcaagggatggaggtggaacctggagaccgactcttaaaagcacagtccgtggttgggtgtggtggctcatgcctgtaagtaagtctcagccctttggaggccacagcagaaggattgcttgagcccaggtactcaaaccagcctgggcaacagagtgaggccctgtcaaaaaaaaatcagccttactgtgaagcctccaaggctgctcgcaggcagctgtggctctcgggaagggaggctgctttgcccagcagggaacatttggggcagggggtaaattttgccagtttgagcatcatgaggtgtaacaagaaatgggttgaatgggccaaatgcaaggagtgcatctctgggctgcaaactgacttgagtgctgcactattgctattccgtgcaaacaaaactcagcttttcctgactcagttccttgacttagtggcctttacaaaaaaagttgagtagtgtgtggcctgctgtcgcacagcccctagttagcttcatggtttctcagcttcagacccctccagcccacagaggagcccatggagggacccacttcccttggtccagacagctgggagtgggttaggcccactgctgttttgagcagggccacttgctccatttcactgaaggctttgctgggtgaaaacacttcagcatctcctcctcaggtcaacccataaagaccaggtccagcaccgtggtcttggcacatccctggcctcaggccctcacctaacagtgaggcagcagctgcccagccccgcaatgtgcctgctgtcaggcagctcttgcctgaaacttacttccacattctttcctgatgggcaggtggctgaaggcccagccatcagtgtcgcttgttgccaccccgtgcctcccttggcctctctgagctttgcccagaagaccaacaatcatacataccctaactgggacaccactctgcagaatgcagatgatccattctggaggaagctgtcccttgagctcagtgagctcccaggcaagcagggcatctggccgacttccctcacaacagctgctcccacatcccctcggactggagcttcagccctgactgaggtgggcagacctaagacctgagaccacaagattagctcagtgtctaccaagcatctagccactgtccagggccagagcataccacgtctgcagtgcctgtgagcagagccagcagttgccctgtgactgtaaccaccaaattgtccaaacacccgctgcagttagcaagaagggtaggcttcaccctcctttactgaggagaatgatgcggaggagtttcctctccagggctaggcaaggcaggcgagcagccagaagccgggtgcccacagggcagggacaggaaggctgtgctgctactggctgctcacttctccatcaacctcaccctctgcaccactaaccaagaccttgtcctcttgcctgtctcgctgctttcacagctgcaacgattgtgtctgcctcatggggttttcctccagagcctttattctgtagccagacgacacgaggagtctgtgtcactgagccagtgcttctagatgctaccctgtgtgggcggcacctcagggacagtaaatcagaaatgctggtcttgaaaccttgaaaagatcaagctgaatgttccttttcatctgtcgctgttgatcttcatctatttaaataggtattctaacgtttcctctctgtatttcatgaagctgatttcctctctctttccttttcagcaatactggagtaaccgcttcctaaaccattttgcagaaatgtaagggtgttcggttgcgtgcatgtgcgtttttagcaacacatctaccaaccctgtgcatgactgatgttggggaaaaagaaaagtaaaaaacttcccaactcactttgtgttatgtggaggaaatgtgtattaccaatggggttgttagcttttaaatcaaaatactgattacagatgtacaatttagcttaatcagaaagcctctccagagaagtttggtttctttgctgcaagaggaatgaggctctgtaaccttatctaagaacttggaagccgtcagccaagtcgccacatttctctgcaaaatgtcatagcttatataaatgtacagtattcaattgtaatgcatgccttcggttgtaagtagccagatccctctccagtgacattggaacatgctactttttaattggccctgtacagtttgcttatttataaattcattaaaaacactacaggtgttgaatggttaaaatgtaggcctccagttcattttcagttattttctgagtgtgcagacagctatttcgcactgtattaaatgtaacttatttaatgaaatcagaagcagtagacagatgttggtgcaatacaaatattgtgatgcatttatcttaataaaatgctaaatgtcaatttatcactgcgcatgtttgactttagactgtaaatagagatcagtttgtttctttctgtgctggtaacaatgagcgtcgcacagacatggtttcaggtaaataaatctattctatgataaattctcagtgtggtggtgactgttctgtgggagggggactgatgggcaccaagggcctccactccgcacccgggcctgcccctctacagggaagcaggggaggctcagtctgggcagggtggccatgtgactagaggggacaggaacctcttggactcgacttcacagtagacaggctgactggcagcaggtccgcccatgtgaagcccaccctggctccctaccctttaaggatgggggaagctgagtgtgtgttaccagtggggtcttaaacacacaaggcctcactcgtcagtgtggtgaagaaagccaagactccgcgctctccattgttagcagcctggaaagatctggagactagcaatggagagatgtttcttaggctgttcagatccaaaacttccacattccccgttgttgataggtatgggatggagaggtgaacagaactgaagcagctgttggaattcatttgctggttactttagtgcttatttggcagtgatgggtttgggattgggtttttggttttgcacattccctaagatgattctttatcactttaaaaaataccaggatacaaggatagctggatgattctataaatctaatttttaaaactatcagttctgggtaggcacggtggctcacgcctgcaatcccagcactttgggaggccgaggcaggcagatcacaaggtaggagatcgagaccatcctggctaacacgatgaaaccccgtctctactaaaaaaaattgccgggtgcggtggctcacgcctgtaatcccagcactttgggaggccgaggcgggcgaatcatgaggtcaggagattgagaccatcctggctaacatggtgaaaccccgtctccactaaaaattcaaaaaattagccgggcgtggtggtgggtgcctatagtcccagctactcaggaggctgaggcaggagaacggcatgaacccgggaggcggagcttgcagtgagccgagatcgcaccattgcactccagcctgggtgacagagcaagactccgtctcaaaaaaaaaaaaaaaaaacaacaacgaaaatacaaaaaattagctgggcatggtggcagttgcctgtagtcccagctactcaggaggctgaggcaagagaatgaatggcgtgaacgtgccactgcattccagcctgggcgacacagcgagactctactgatcagttctgctgatggagaaaaaaaatttgataaaatttaacatccattttctaaaaattattcctatgtaccatttattattagaaaccaaaagtgttaacgctttagagttgcattccaagtccactcttgcccactaccaaacactgttctagaggtgctagtcagtacaatcgggcacgagaaggaaaaaatgccttggaatgaacaaaaagcgatcaggggtcatactgggtcaatgttcctagacaggaactattttgttcctagttagaaatgtttaatgattcagggaaaattgacagctgaatgggagtgacatataattcatactgatatatgagaataccaatggtggccttaggccaatcctaacaaacatcaggcagacaaaaaccaaggaagcacaccaaacctcttaaagctatggtaattcagtgcatcacttgagaagggtggtgtttcagcttagtaggtaatagttggattattatgtggggggtcatcttgagaaaaataaagctgtatcccttacacccaataaattgcaaacggatcaaaatacttggaaaatgcaactatacccccaaaagaaacatggttaaatggtgtaaacgagagaaaacaaatagctcatgtgaaaagatgctcaactccactggcaaattaaaatcacgaggtaacgtctcgagaagtgggtcttctgatgccaaggatggagcagcttgcgaggatgaactctagggaatgaccgaaatcactcagcctagaggtgttctcaacacccttacccctgcccccgccccaagcaggtccactcctagagaatctcacacatggggaagagccacagcagagtttttggagaaaaatgaaaccaccagcaggaaaatgggtgagtacattcaggcatattcagatgatgctcagctatgaaataagctagaactacgttatcaacctaaataaatcctgaacagtgaagccaagtgcagcaacatatcaatatgcacaataccgcctcatatcctctaaacgtggcccacgggccaggctggctgagagaaagtgtgtacaccagagtgtacatcaacgtggactagtaccaaacagattggtaatgagtttgtggacatcagccagaggctgtgaaagcccgaatcgatagtggttaattcagtgagggagaggggcggagacgaggaaaggcagatactgctttacctatcagtaaggaaagtatagacagaggtgttcattatgcctgtttgcgtgtcagattttcatttttggggagggtgggaagtgacagtgtcccaggctggggtgcaacggtgccatcatggcttgctgcagcctcaacctcctgggttcaagcgatcctcctgcctcagcctcttgagtagctaagactataagtgcacactaccacacctggcaaattttataatttttggtagaaatgggatcttgctacttgcccaggctggtcttgaactcctggcctctagtgaccctctcatgtcagctcccctagtcgctgggattacaagcataagctaccacacacagctctcagatttttaaatatctatatcctttgatcaagaacttcactttcctgaaatcctcccatatgttcaaaaagtataatccctactgcactcttgtagcagaagagtggaaataagctgatgttcatcaagaggcaagaactgaataaggtagagagcattcaaaccatggaataccgtgcagcctttgaaaaagacaaggtacacgtgtgtacgagcaaggaatgatgtctgatatacgttgtctgcccagggaaatattcaattacagagcagtttgtattataatctaccattttttagaaacagaaggaagttaacagtttctagtaatgacagttgctgagaataacaaaatgctgcatatagatggcagatggtggaagccaggtctctctgttggagtgggaggaagcagaggaagcaaggggagaagctaagataagcaaggggaggaagctagaataatccatgtggtaatgaattagagccggagatatcaggatgaagtcatgtttagcttcatatgtacggatggtttcatatagaaacactgatagtggcgaggcacagtgactcacgcctataatctcagcactttaggaggctgaggcaggaggatgaggagcccagcagtttgagaccagcctgggcaacacagtgagaccccacatctacaaaaaattttaaaaattagccaggcatggtggtgcctgcctgtagtcccagctactctggaggctgaggcaggaggatcacctgaacccagcaggacaagatcacaccagtgcactccaccctgcacgacgcagcgagagcctgtttcaagaaaaggaaaaaagaaaaactgctgactgtgatgtgtatatacactggtcactacacacatgcatttccttgtactgtcagctcagaaggcaatgaacacacttggcttccagtgttaggtttctaatgccattctccagtaaaaaagggctccttggagaaatggctgattctagagatgggacagaaaacgtacagtacgtgcctgaagaataccaaagcaccagaaaggaagggctcaaaaacagcaatcaaagatgtggttatgtgaaaggaacacaggagccaactgaaaaagccacaacagccgaagaatgtgagcaacaaaataaagcagtattggactagaatccaaagtataaatatccataagtccacgctgacataaacaaataaataaatgggggtgactacaaatcttccatgcagaattccaagtaatttacatggacactgcctcaggaggtggagactcacctcctctgtgggctgtgcaatgttccaaagagtacatacagtagggatgggaaagtgcccgtcactgtggagacctgacatgctacctcagccagggggcgtcatcttgaaagcatgggcccttgatctgaagtgatgaaaatggcattttacctttgtggtcttcctctcaaaatacacaacctcagtctaatcatcatcagaaaacacctgaccaatccccaaacgaaaaatccctgactggtattcctcaaaactgttgaggtcatcaaaccaggaaagtgagaaaagtataatcatcagaatgtaaaaacgaatggggccaggtgcagtggctcacgcctgtaatcccagcactttgggaggccaaggtagttggatcacttgaggtcaggagttcaagaccagcctgatcaacatggtgaaaccccatctctactaaaaatacaaaaaaattacctgggcatgatggtgcatgcctgtaatcccagctactcaggaggctgaggcaggagaatcgcttaaacctgggaggcggaggttgcagcagtgagccgagatcaagccactgcattctcggctgggcaacagagagagactctgtctccacaaaaaaaaaaaaaaaaaggccgggcgcggtggctcacgcctgtaatcccagcactgggaggccaaggcaggtggatcatgaggtcaggagattgagatcatcctggctaacatggtgaaaccccatctctactaaaaatacaaaaaaaaaaaaaagaaagaaagaaattagccaggcatggtggcgggcgcctgtagtcccagctactcaggaggctgaggcaggaggatggtgtgaacccaggaggcggagcttgcagtgagccgagattgcaccactgcaccccagcctgggcaacagagggagactccatctcaccaaaaaaaagaataaaaaaaaggttggccagcctgggcaatatagtgagacctcaaatcggcaaaaaatttaaaaattggccaggcaaggtggctcatgactgtaatcccagcactttgggaagctgaggagggtggatcgcgaggtcagcagttcaagaccagcctggccaagatggggagaccccgtgtttactaaaaatacaaaaaaaaaaaaaaatagccaggtgaagtggcaggcacctgtaaacccagctacttgggaggctgaggcaggagaatcgtttgaacccggggggcgtaggttgcagtgagcagagattgcgccattgcactccagcctggctgggcgattgagactccgtctcaaaaaaataaataaataaaaattaaaaattatcctggcatagtagcacatgcctgtagtcccagctactgaggggcccaaggcgtgaggatcacgtgggcacaggagtttgaggttacagtgagctgactgcaccactggactctagcctgaacacagcaagaccctgcctgtcgcaaaaaaaaaaaacaaaaacaaaaacaaaacaacttcatggttggatgtggcatcaaaattgacacagcaaaataatgaatgaggctgggcgcggtggctcacgcctgtaatcccagcactttcggaggccaaggcaggcagatcacctgaggtcgggagtttgagaccagcctgaccaacatggagaaatcccgtctctactgaaaatacaaaattagcccagcctggtggcagtagcctgtaatcccagctacttgggagactgaggcaggagaatcacttgaacccgggaagtagaggttgcagtgaaacgagatcgtgctattgcactccagcctgagcaacaagagcgaaactctgtctcaaaaaataataataataataatgaaatggtcgatgagaataaattaattagaatgcagcagaaggtgagggtggggagaaaaggctagaaaacatgcaggaaaggtaagatacctagaagacagactgagaaaagcgacaaagtcaaatatacatttcactaccttcaaaagagggccaggcacagtggctcacgcctgtaatctcagcactttgtgagactgaagctggaggatcacttgagcccaggagtatggaacagtctcggctacttgggaagctgaggcaggaagatcacttgaggccagaaggtggaagctgcagtggccatgagtataccactgcactccagcctggaccacaggcacatgctgtcacatctggctaattaaaaaaaaattttttttactgggtgtggtggcgcatgcctgtgcagctactcgggaggctgagatgggaggatcacttaagtccaggatacaggataactaaaaagaaatccaggctaggtatggtggttcacacacgtaatctcagcactttgggaggcccaaggtgggagggctgcttgagcccagtactttgaaaccaacctgggaaacagcaaaaaaccatctctaccgaaaaaaacaaaaacaaaaattaggtgggcatggtagtacattcctatattccgcattcccagctactttggaggctgaggcgggaggatgtcttgagtctgggaggcggaggttgcagtgagctgagattgcaccaccgcacttcccagcctgaaggacagagccagatcctatctcaaaaaaaaaaaaaaaaaaaaaaaaaaaaaaagagagagagaagtcaatcattccagccctagtaataaactgcagaaaaccaaagaaaatcttaagagcagtgggggacggggcagaggtaaatatcatcttcaaaggagactgacattacaacagtaacaatgaaagccagaaaccaacgggatggcagcttcatgtgctgaaggcgattaatggcaacctggagagagtatgtagtatttaagcatatagtattcagggtgaaataaagatatttttaggcaaaaacagggttcaggccgggcacagtggctcatgcctgtaatcccagcactttcagaggccaaggtgggaggaccatttgaggtcaagagtttgagaccagcctggcccaacatggtgaaaccccatctctactaaaaatacaaaaactagctgggcggtagtggtgcacatctgtaatcccagctactcaggagtctgaggcaggagaatcacttgagcctggaagatggaggttgtagtgagccgagatcataccactccagcctgagcaacacagtgagaccctgtctcaaaaaaaaaaaaaaaaaaagaaagaaaagaaagaaacagttcttcatcagcagacccacactaagggaaactccagatggggtgggtgtaaacagaatttaaatgatctgagagcttttgtcatccaagaggacagacagtaaagacatcagttaactttaggtgtggatatgttaaataaatacattgcaattcctaggataaccactaaaggaacagaaacacaggccagactagcatgctgcctgaaggaaaaaaaggaacctaaaattacagaatagcaaggataagatgatagattccaaccccaaatataatcaataacaacgttttaagaatatactaaatatgttattcctgttcctctattacaagagaatgattttagcatggctgagacattcctattttggaaagcaatctgtacatttttttttttttttttttgagacagagtctcgcactgttgcccaggctggagtgcagtggcatgatcttagctcactgcaagctccgccttccaggttcacgctattctcctgcctcagcctcccaagtagttgggactacaggcacctgccaccacgcccagctaattttttttttctgtatttttagtagagccaggtttcactgtgttagacaggatggtctcgatctcctgacctcgtgatccatccgcctcagcctcccaaagtgctgggattacaagcatgagccaccgtgcccagcctagcaatctgtacttctgacaggactccctgcagggggaggagagaaaaacatgtccagtagtcagccagtgagtgttggtaaagtttaaattggatgtttttccatcaaaataagtagaggctgggtgcagtagctcacacctgtaatcccggtaatttgggaggccaaggcagaaggatcacttgagcccaggagttcgagaccagcctgagtaacatagtgagaaccttgttgctacaaaaaattagccaaggccggacacagtagctcatgcctataatcccagcactttgggaggctgaggtgggcagatcatgaggtcaggagttcgagacaagcctgatcaacatggtgaaaccccatctctactaaaaatacaaaaattagccaggtgtggtgcacataagtagcaatcataaaaatgtattttgtaagtttggaaattactgggcgacagagtgagactccatctaaaaaaaaaaaaaattagccgagtgtggtgacgtgtgcctgtagtcccagctactagggaggctgaggcaggaggatcacttgagcctgggaggttgatgctgaagtgagccacgatcacgccactgcactccagcttgcacaagagtgagaccctgtctcaagaaaataaataagtagaaatcataaaaatgtgttttttaagtttggaaattactcaaaatgccttgatttgtgactaagaatgtacaaactttaacatttatttttttttatatttatcaatcataacctgtttaagaaacagattctattgaaaactgggacttaaccaggcacagtgtctcatggcacaatctcggctcactgcaaactccatctcccaggttcatgcaattctcctgcttcagcctcccgagtagctgggattacaggtttacatcaccatgcccagctaattttttgtattttcagtagagacggggcgcttcactatgttggccaggctagtatcaaactcctgacctcaggtgacccacccgcctcagcatttttttttttttttttgagacagagtcttgctctgtcgcccaggctggagtgcagtggcgcaatctcagctcactgtaacctccaccttcggggttcaagcaattctcctgcctcagcctcctgagtagctgggattacaggcacgcgccaccacgcccggctaatttttgtacttttagtagagacggggtttcatcatgttgatcaggctggttttgaactcctgacctcatgatctgcccacctcagcctcccaaagtgttgggattacaggcgtaagccacgatgcctggccacagttttttttttaattacagggtctcgctatgttgcccaggctgtagtgcagtggctattcacaggcatgatcccaccaccgatcagcacaggagttctgacctgctccgtttctgacctgggccagttcacccctccttaggcaacctggtggccccccactccctggaggtcaccatcttgatgccgaacttagcgcaaacacccgattggcatagtgcactgcagcccagaactctggggctcaagcgatccttgcacctcagcctcccaagtagctgggactacaggcacacgccactgtgcctggcaaaaaaaaaaattttttaattagccagatgtgcaggcacgtgcctgtggtcccagctaagtgggaggctgaggtgggagaatggtttgagcccaggaggttgaggctgcagtgagctgtgatcatgccactgtactccaacctgggtgacagagtaagacactgtctcaaaaacaaaaaaagaaaaaaaaaatgagagttttggctgggtacggtggctcaagcctgtaatcccagcactttgcgaggccaaggcgggtggattatctgaggtcaggagttcaagatcagcatggctagcatggtgaaaccccgtctctactaaaactacaaaaatttgtccggcgtggtgacaggcacctgtaatctcagctacttgggaggctgaggcaggaaaatcgcttgagcccaggaggcagaggttgcagtgagccgagagtgcaccactgcattccagcctgggcaacagagcaagacttaaaaaaaaaaaagactttactttttataaactctgctgatgaactgtgcaaatacaaaaggggggtggcatatgcatatccacttatgtgatttcaaattatttctggaaaaatacatgagaaactagtaactatggttccttctagagaggcaactagaaggcaggcagggtggggaaatttcataatttccctttttgaaaattgctgtctagtctatttagaaagaaaaaaagaaaactgctctgacttattatgtgtgaatcttaaaaggatatatatataggccagggttaatggctcatgcctataatcccagcactggcaggctgaggtgggcagatcacttgaaggcaggagcttgtgaccagcctggccaacatagcgaaatcccatcactactaaaaatacaaaaaaattagctgggtgtggtggagcatgcctgtaatcccagctactcgggaggctgaggtaggagaaacatttgaacctgagaggaggagattgcagtgagctgagatcatgccactgtactccagcctgggcaacacagcgagactctgtctcaaaaaataatactaaaaaccaataaaattggatccctacatcacaccatagagagtacattttgaccttgagtaaggaaggatttcttaagaattgtaaaacacgggccgggcacggtggctcacgcttgtaatcccagcactttgggaggccgaggtgagtggatcacgagatcaggagatcaagaccatcctggctaacacagtgaaaccccgtctctacttaaaaaaaaaaaaaaaaaaaaaaaaaaaaaattagccaggcttggtggcacacacctgtagtcccagctactcgggaggctgaggttgcagtgggcagagatcgcgccactgcactccagcctgagggacagagtaagactccatctcaaaaagaaaaagaattgtaaagcacaaccataaagaaaaagattcaactatattaaaattaagaccctctgttaaccaaaagataccacagagaatgacaagccataaactggaagaagatattgccaactcatgttcgaaattgtatctagaatatacaaagaatgactatgaattaatgagaacaagataatccaatagaaaagtaggcaaaacaacaggaatttcagagaagaggaaatcattcctctgcaaaatcgttactaaatatataaaatattgttcaatattattacaaaacaggaaaatctaaattacagtaactatgtcatctcacacacagtgtattggagaaaattaaagattgataatacccagttagtgaggaaatggaacaaagtgctgcaggtgagcatgttgatttgtacattatatatttctgtaaaaataaaatacatagcagaagcagtttgaaacaaaaagttagaaaaaaaagtccatcaacagaataaaatggataccttatatccacgcagattcttatattgcaatgaaaactgaataaggcaccctacaaaacccttgacgagtactcctcaaaactgacaaagttagtaaaaacaagtgtgagaaactgatagccatgaggagcctaaggagacatgatgactatgtaatgtggaatcttagatgagattctgaaacagaaaaaggacattaggaaaaaaactgagtaaatctgggccaggtgtggtggcttatgcctgtaatcccaacactttgggaggccgagacaggtagatcacctgaggtcaggagttcgagaccagcctggccaacacggcaaaaccctgactctactataaacacaaaacattaactgaaggtggtggggggaggctgaggcaggagaatcacttgaacccagga

SEQ ID NO: 524 - DNA, 93866 bp, Homo sapiens
tcctgggttcaagtgattctcctgcctcagcctccccccaccaccttcagttaatgttttgtgtttatagtagagtcagggttttgccgtgttggccaggctggtctcgaactcctgacctcaggtgatctacctgtctcggcctcccaaagtgttgggattacaggcataagccaccacacctggcccagatttactcagtttttttcctaatgtcctttttctgtttcagaatctcatctaagattccacattacatagtcatcatgtctccttaggctcctcatggctatcagtttctcacacttgtttttactaactttgtcagttttgaggagtactcgtcaagggttttgtagggtgccttattcagttttcattgcaatataagaatctgcgtggatataaggtatccattttattctgttgatggacttttttttctaactttttgtttcaaactgcttctgctatgtattttatttttacagaaatatataatgtacaaatcaacatgctcacctgcagcactttgttccatttcctcactaactgggtattatcaatctttaattttctccaatacactgtgtgtgagatgacatagttactgtaatttagattttcctgttttgtaataatattgaacaatattttatatatttagtaacgattttgcagaggaatgatttcctcttctctgaaattcctgttgttttgcctacttttctattggattatcttgttctcattaattcatagtcattctttgtatattctagatacaatttcgaacatgagttggcaatatcttcttccagtttatggcttgtcattctctgtggtatcttttggttaacagagggtcttaattttaatatagttgaatctttttctttatggttgtgctttacaattctttttctttttgagatggagtcttactctgtccctcaggctggagtgcagtggcgcgatctctgcccactgcaacctcagcctcccgagtagctgggactacaggtgtgtgccaccaagcctggctaattttttttttttttttttttttttttttttaagtagagacggggtttcactgtgttagccaggatggtcttgatctcctgatctcgtgatccactcacctcggcctcccaaagtgctgggattacaagcgtgagccaccgtgcccggcccgtgttttacaattcttaagaaatccttccttactcaaggtcaaaatgtactctctatggtgtgatgtagggatccaattttattggtttttagtattattttttgagacagagtctcgctgtgttgcccaggctggagtacagtggcatgatctcagctcactgcaatctcctcctctcaggttcaaatgtttctcctacctcagcctcccgagtagctgggattacaggcatgctccaccacacccagctaatttttttgtatttttagtagtgatgggatttcgctatgttggccaggctggtcacaagctcctgccttcaagtgatctgcccacctcagcctgccagtgctgggattataggcatgagccattaaccctggcctatatatatatccttttaagattcacacataataagtcagagcagttttctttttttctttctaaatagactagacagcaattttcaaaaagggaaattatgaaatttccccaccctgcctgccttctagttgcctctctagaaggaaccatagttactagtttctcatgtatttttccagaaataatttgaaatcacataagtggatatgcatatgccaccccccttttgtatttgcacagttcatcagcagagtttataaaaagtaaagtcttttttttttttaagtcttgctctgttgcccaggctggaatgcagtggtgcactctcggctcactgcaacctctgcctcctgggctcaagcgattttcctgcctcagcctcccaagtagctgagattacaggtgcctgtcaccacgccggacaaatttttgtagttttagtagagacggggtttcaccatgctagccatgctgatcttgaactcctgacctcagataatccacccgccttggcctcgcaaagtgctgggattacaggcttgagccaccgtacccagccaaaactctcattttttttttctttttttgtttttgagacagtgtcttactctgtcacccaggttggagtacagtggcatgatcacagctcactgcagcctcaacctcctgggctcaaaccattctcccacctcagcctcccacttagctgggaccacaggcacgtgcctgcacatctggctaattaaaaaatttttttttttgccaggcacagtggcgtgtgcctgtagtcccagctacttgggaggctgaggtgcaaggatcgcttgagccccagagttctgggctgcagtgcactatgccaatcgggtgtttgcgctaagttcggcatcaagatggtgacctccagggagtggggggccaccaggttgcctaaggaggggtgaactggcccaggtcagaaacggagcaggtcagaactcctgtgctgatcggtggtgggatcatgcctgtgaatagccactgcactacagcctgggcaacatagcgagaccctgtaattaaaaaaaaaactgtggccaggcatcgtggcttacgcctgtaatcccaacactttgggaggctgaggtgggcagatcatgaggtcaggagttcaaaaccagcctgatcaacatgatgaaaccccgtctctactaaaagtacaaaaattagccgggcgtggtggcgcgtgcctgtaatcccagctactcaggaggctgaggcaggagaattgcttgaaccccgaaggtggaggttacagtgagctgagattgcgccactgcactccagcctgggcgacagagcaagactctgtctcaaaaaaaaaaaaaaaaatgctgaggcgggtgggtcacctgaggtcaggagtttgatactagcctggccaacatagtgaagcgccccgtctctactgaaaatacaaaaaattagctgggcatggtgatgtaaacctgtaatcccagctactcgggaggctgaagcaggagaattgcatgaacctgggagatggagtttgcagtgagccgagattgtgccatgagacactgtgcctggttaagtcccagttttcaatagaatctgtttcttaaacaggttatgattgataaatataaaaaaaaataaatgttaaagtttgtacattcttagtcacaaatcaaggcattttgagtaatttccaaacttaaaaaacacatttttatgatttctacttatttattttcttgagacagggtctcactcttgtgcaagctggagtgcagtggcgtgatcgtggctcacttcagcatcaacctcccaggctcaagtgatcctcctgcctcagcctccctagtagctgggactacaggcacacgtcaccacactcggctaattttttttttttttagatggagtctcactctgtcgcccagtaatttccaaacttacaaaatacatttttatgattgctacttatgtgcaccacacctggctaatttttgtatttttagtagagatggggtttcaccatgttgatcaggcttgtctcgaactcctgacctcatgatctgcccacctcagcctcccaaagtgctgggattataggcatgagctactgtgtccggccttggctaattttttgtagcaacaaggttctcactatgttactcaggctggtctcgaactcctgggctcaagtgatccttctgccttggcctcccaaattaccgggattacaggtgtgagctactgcacccagcctctacttattttgatggaaaaacatccaatttaaactttaccaacactcactggctgactactggacatgtttttctctcctccccctgcagggagtcctgtcagaagtacagattgctaggctgggcacggtggctcatgcttgtaatcccagcactttgggaggctgaggcggatggatcacgaggtcaggagatcgagaccatcctgtctaacacagtgaaacctggctctactaaaaatacagaaaaaaaaaattagctgggcgtggtggcaggtgcctgtagtcccaactacttgggaggctgaggcaggagaatagcgtgaacctggaaggcggagcttgcagtgagctaagatcatgccactgcactccagcctgggcaacagtgcgagactctgtctcaaaaaaaaaaaaaaaaaaatgtacagattgctttccaaaataggaatgtctcagccatgctaaaatcattctcttgtaatagaggaacaggaataacatatttagtatattcttaaaacgttgttattgattatatttggggttggaatctatcatcttatccttgctattctgtaattttaggttcctttttttccttcaggcagcatgctagtctggcctgtgtttctgttcctttagtggttatcctaggaattgcaatgtatttatttaacatatccacacctaaagttaactgatgtctttactgtctgtcctcttggatgacaaaagctctcagatcatttaaattctgtttacacccaccccatctggagtttcccttagtgtgggtctgctgatgaagaactgtttctttcttttctttctttttttttttttttttttgagacagggtctcactgtgttgctcaggctggagtggtatgatctcggctcactacaacctccatcttccaggctcaagtgattctcctgcctcagactcctgagtagctgggattacagatgtgcaccactaccgcccagctagtttttgtatttttagtagagatggggtttcaccatgttgggccaggctggtctcaaactcttgacctcaaatggtcctcccaccttggcctctgaaagtgctgggattacaggcatgagccactgtgcccggcctgaaccctgtttttgcctaaaaatatctttatttcaccctgaatactatatgcttaaatactacatactctctccaggttgccattaatcgccttcagcacatgaagctgccatcccgttggtttctggctttcattgttactgttgtaatgtcagtctcctttgaagatgatatttacctctgccccgtcccccactgctcttaagattttctttggttttctgcagtttattactagggctggaatgattgacttctctctctctttttttttttttttttttttttttttttttgagataggatctggctctgtccttcaggctgggaagtgcggtggtgcaatctcagctcactgcaacctccgcctcccagactcaagacatcctcccgcctcagcctccaaagtagctgggaatgcggaatataggaatgtactaccatgcccacctaatttttgtttttgtttttttcggtagagatggttttttgctgtttcccaggttggtttcaaagtactgggctcaagcagccctcccaccttgggcctcccaaagtgctgagattacgtgtgtgaaccaccatacctagcctggatttctttttagttatcctgtatcctggacttaagtgatcctcccatctcagcctcccgagtagctgcacaggcatgcgccaccacacccagtaaaaaaaatttttttttaattagccagatgtgacagcatgtgcctgtggtccaggctggagtgcagtggtatactcatggccactgcagcttccaccttctggcctcaagtgatcttcctgcctcagcttcccaagtagccgagactgttccatactcctgggctcaagtgatcctccagcttcagtctcacaaagtgctgagattacaggcgtgagccactgtgcctggccctcttttgaaggtagtgaaatgtatatttgactttgtcgcttttctcagtctgtcttctaggtatcttacctttcctgcatgttttctagccttttctccccaccctcaccttctgctgcattctaattaatttattctcatcgaccatttcattattattattattattttttgagacagagtttcgctcttgttgctcaggctggagtgcaatagcacgatctcgtttcactgcaacctctacttcccgggttcaagtgattctcctgcctcagtctcccaagtagctgggattacaggctactgccaccaggctgggctaattttgtattttcagtagagacgggatttctccatgttggtcaggctggtctcaaactcccgacctcaggtgatctgcctgccttggcctccgaaagtgctgggattacaggcgtgagccaccgcgcccagcctcattcattattttgctgtgtcaattttgatgccacatccaaccatgaagttgttttgtttttgtttttgttttttttttttgcgacaggcagggtcttgctgtgttcaggctagagtccagtggtgcagtcagctcactgtaacctcaaactcctgtgcccacgtgatcctcacgccttgggcccctcagtagctgggactacaggcatgtgctactatgccaggataatttttaatttttatttatttatttttttgagacggagtctcaatcgcccagccaggctggagtgcaatggcgcaatctctgctcactgcaacctacgccccccgggttcaaacgattctcctgcctcagcctcccaagtagctgggtttacaggtgcctgccacttcacctggctatttttttttttttttgtatttttagtaaacacggggtctccccatcttggccaggctggtcttgaactgctgacctcgcgatccaccctcctcagcttcccaaagtgctgggattacagtcatgagccaccttgcctggccaatttttaaattttttgccgatttgaggtctcactatattgcccaggctggccaaccttttttttattcttttttttggtgagatggagtctccctctgttgcccaggctggggtgcagtggtgcaatctcggctcactgcaagctccgcctcctgggttcacaccatcctcctgcctcagcctcctgagtagctgggactacaggcgcccgccaccatgcctggctaatttctttctttcttttttttttttttgtatttttagtagagatggggtttcaccatgttagccaggatgatctcaatctcctgacctcatgatccacctgccttggcctcccagtgctgggattacaggcgtgagccaccgcgcccggcctttttttttttttttttgtggagacagagtctctctctgttgcccagccgagaatgcagtggcttgatctcggctcactgctgcaacctccgcctcccaggtttaagcgattctcctgcctcagcctcctgagtagctgggattacaggcatgcaccatcatgcccaggtaatttttttgtatttttagtagagatggggtttcaccatgttgatcaggctggtcttgaactcctgacctcaagtgatccaactaccttggcctcccaaagtgctgggattacaggcgtgagccactgcacctggccccattcgtttttacattctgatgattatacttttctcactttcctggtttgatgacctcaacagttttgaggaataccagtcagggatttttcgtttggggattggtcaggtgttttctgatgatgattagactgaggttgtgtattttgagaggaagaccacaaaggtaaaatgccattttcatcacttcagatcaagggcccatgctttcaagatgacgccccctggctgaggtagcatgtcaggtctccacagtgacgggcactttcccatccctactgtatgtactctttggaacattgcacagcccacagaggaggtgagtctccacctcctgaggcagtgtccatgtaaattacttggaattctgcatggaagatttgtagtcacccccatttatttatttgtttatgtcagcgtggacttatggatatttatactttggattctagtccaatactgctttattttgttgctcacattcttcggctgttgtggctttttcagttggctcctgtgttcctttcacataaccacatctttgattgctgtttttgagcccttcctttctggtgctttggtattcttcaggcacgtactgtacgttttctgtcccatctctagaatcagccatttctccaaggagcccttttttactggagaatggcattagaaacctaacactggaagccaagtgtgttcattgccttctgagctgacagtacaaggaaatgcatgtgtgtagtgaccagtgtatatacacatcacagtcagcagtttttcttttttccttttcttgaaacaggctctcgctgcgtcgtgcagggtggagtgcactggtgtgatcttgtcctgctgggttcaggtgatcctcctgcctcagcctccagagtagctgggactacaggcaggcaccaccatgcctggctaatttttaaaattttttgtagatgtggggtctcactgtgttgcccaggctggtctcaaactgctgggctcctcatcctcctgcctcagcctcctaaagtgctgagattataggcgtgagtcactgtgcctcgccactatcagtgtttctatatgaaaccatccgtacatatgaagctaaacatgacttcatcctgatatctccggctctaattcattaccacatggattattctagcttcctccccttgcttatcttagcttctccccttgcttcctctgcttcctcccactccaacagagagacctggcttccaccatctgccatctatatgcagcattttgttattctcagcaactgtcattactagaaactgttaacttccttctgtttctaaaaaatggtagattataatacaaactgctctgtaattgaatatttccctgggcagacaacgtatatcagacatcattccttgctcgtacacacgtgtaccttgtctttttcaaaggctgcacggtattccatggtttgaatgctctctaccttattcagttcttgcctcttgatgaacatcagcttatttccactcttctgctacaagagtgcagtagggattatactttttgaacatatgggaggatttcaggaaagtgaagttcttgatcaaaggatatagatatttaaaaatctgagagctgtgtgtggtagcttatgcttgtaatcccagcgactaggggagctgacatgagagggtcactagaggccaggagttcaagaccagcctgggcaagtagcaagatcccatttctaccaaaaattataaaatttgccaggtgtggtagtgtgcacttatagtcttagctactcaagaggctgaggcaggaggatcgcttgaacccaggaggttgaggctgcagcaagccatgatggcaccgttgcaccccagcctgggacactgtcacttcccaccctccccaaaaatgaaaatctgacacgcaaacaggcataatgaacacctctgtctatactttccttactgataggtaaagcagtatctgcctttcctcgtctccgcccctctccctcactgaattaaccactatcgattcgggctttcacagcctctggctgatgtccacaaactcattaccaatctgtttggtactagtccacgttgatgtacactctggtgtacacactttctctcagccagcctggcccgtgggccacgtttagaggatatgaggcggtattgtgcatattgatatgttgctgcacttggcttcactgttcaggatttatttaggttgataacgtagttctagcttatttcatagctgagcatcatctgaatatgcctgaatgtactcacccattttcctgctggtggtttcatttttctccaaaaactctgctgtggctcttccccatgtgtgagattctctaggagtggacctgcttggggcgggggcaggggtaagggtgttgagaacacctctaggctgagtgatttcggtcattccctagagttcatcctcgcaagctgctccatccttggcatcagaagacccacttctcgagacgttacctcgtgattttaatttgccagtggagttgagcatcttttcacatgagctatttgttttctctcgtttacaccatttaaccatgtttcttttgggggtatagttgcattttccaagtattttgatccgtttgcaatttattgggtgtaagggatacagctttatttttctcaagatgaccccccacataataatccaactattacctactaagctgaaacaccacccttctcaagtgatgcactgaattaccatagctttaagaggtttggtgtgcttccttggtttttgtctgcctgatgtttgttaggattggcctaaggccaccattggtattctcatatatcagtatgaattatatgtcactcccattcagctgtcaattttccctgaatcattaaacatttctaactaggaacaaaatagttcctgtctaggaacattgacccagtatgacccctgatcgctttttgttcattccaaggcattttttccttctcgtgcccgattgtactgactagcacctctagaacagtgtttggtagtgggcaagagtggacttggaatgcaactctaaagcgttaacacttttggtttctaataataaatggtacataggaataatttttagaaaatggatgttaaattttatcaaattttttttctccatcagcagaactgatcagtagagtctcgctgtgtcgcccaggctggaatgcagtggcacgttcacgccattcattctcttgcctcagcctcctgagtagctgggactacaggcaactgccaccatgcccagctaattttttgtattttcgttgttgttttttttttttttttttgagacggagtcttgctctgtcacccaggctggagtgcaatggtgcgatctcggctcactgcaagctccgcctcccgggttcatgccgttctcctgcctcagcctcctgagtagctgggactataggcacccaccaccacgcccggctaattttttgaatttttagtggagacggggtttcaccatgttagccaggatggtctcaatctcctgacctcatgattcgcccgcctcggcctcccaaagtgctgggattacaggcgtgagccaccgcacccggcaattttttttagtagagacggggtttcatcgtgttagccaggatggtctcgatctcctaccttgtgatctgcctgcctcggcctcccaaagtgctgggattgcaggcgtgagccaccgtgcctacccagaactgatagttttaaaaattagatttatagaatcatccagctatccttgtatcctggtattttttaaagtgataaagaatcatcttagggaatgtgcaaaaccaaaaacccaatcccaaacccatcactgccaaataagcactaaagtaaccagcaaatgaattccaacagctgcttcagttctgttcacctctccatcccatacctatcaacaacggggaatgtggaagttttggatctgaacagcctaagaaacatctctccattgctagtctccagatctttccaggctgctaacaatggagagcgcggagtcttggctttcttcaccacactgacgagtgaggccttgtgtgtttaagaccccactggtaacacacactcagcttcccccatccttaaagggtagggagccagggtgggcttcacatgggcggacctgctgccagtcagcctgtctactgtgaagtcgagtccaagaggttcctgtcccctctagtcacatggccaccctgcccagactgagcctcccctgcttccctgtagaggggcaggcccgggtgcggagtggaggcccttggtgcccatcagtccccctcccacagaacagtcaccaccacactgagaatttatcatagaatagatttatttacctgaaaccatgtctgtgcgacgctcattgttaccagcacagaaagaaacaaactgatctctatttacagtctaaagtcaaacatgcgcagtgataaattgacatttagcattttattaagataaatgcatcacaatatttgtattgcaccaacatctgtctactgcttctgatttcattaaataagttacatttaatacagtgcgaaatagctgtctgcacactcagaaaataactgaaaatgaactggaggcctacattttaaccattcaacacctgtagtgtttttaatgaatttataaataagcaaactgtacagggccaattaaaaagtagcatgttccaatgtcactggagagggatctggctacttacaaccgaaggcatgcattacaattgaatactgtacatttatataagctatgacattttgcagagaaatgtggcgacttggctgacggcttccaagttcttagataaggttacagagcctcattcctcttgcagcaaagaaaccaaacttctctggagaggctttctgattaagctaaattgtacatctgtaatcagtattttgatttaaaagctaacaaccccattggtaatacacatttcctccacataacacaaagtgagttgggaagttttttacttttctttttccccaacatcagtcatgcacagggttggtagatgtgttgctaaaaacgcacatgcacgcaaccgaacacccttacatttctgcaaaatggtttaggaagcggttactccagtattgctgaaaaggaaagagagaggaaatcagcttcatgaaatacagagaggaaacgttagaatacctatttaaatagatgaagatcaacagcgacagatgaaaaggaacattcagcttgatcttttcaaggtttcaagaccagcatttctgatttactgtccctgaggtgccgcccacacagggtagcatctagaagcactggctcagtgacacagactcctcgtgtcgtctggctacagaataaaggctctggaggaaaaccccatgaggcagacacaatcgttgcagctgtgaaagcagcgagacaggcaagaggacaaggtcttggttagtggtgcagagggtgaggttgatggagaagtgagcagccagtagcagcacagccttcctgtccctgccctgtgggcacccggcttctggctgctcgcctgccttgcctagccctggagaggaaactcctccgcatcattctcctcagtaaaggagggtgaagcctacccttcttgctaactgcagcgggtgtttggacaatttggtggttacagtcacagggcaactgctggctctgctcacaggcactgcagacgtggtatgctctggccctggacagtggctagatgcttggtagacactgagctaatcttgtggtctcaggtcttaggtctgcccacctcagtcagggctgaagctccagtccgaggggatgtgggagcagctgttgtgagggaagtcggccagatgccctgcttgcctgggagctcactgagctcaagggacagcttcctccagaatggatcatctgcattctgcagagtggtgtcccagttagggtatgtatgattgttggtcttctgggcaaagctcagagaggccaagggaggcacggggtggcaacaagcgacactgatggctgggccttcagccacctgcccatcaggaaagaatgtggaagtaagtttcaggcaagagctgcctgacagcaggcacattgcggggctgggcagctgctgcctcactgttaggtgagggcctgaggccagggatgtgccaagaccacggtgctggacctggtctttatgggttgacctgaggaggagatgctgaagtgttttcacccagcaaagccttcagtgaaatggagcaagtggccctgctcaaaacagcagtgggcctaacccactcccagctgtctggaccaagggaagtgggtccctccatgggctcctctgtgggctggaggggtctgaagctgagaaaccatgaagctaactaggggctgtgcgacagcaggccacacactactcaactttttttgtaaaggccactaagtcaaggaactgagtcaggaaaagctgagttttgtttgcacggaatagcaatagtgcagcactcaagtcagtttgcagcccagagatgcactccttgcatttggcccattcaacccatttcttgttacacctcatgatgctcaaactggcaaaatttaccccctgccccaaatgttccctgctgggcaaagcagcctcccttcccgagagccacagctgcctgcgagcagccttggaggcttcacagtaaggctgatttttttttgacagggcctcactctgttgcccaggctggtttgagtacctgggctcaagcaatccttctgctgtggcctccaaagggctgagacttacttacaggcatgagccaccacacccaaccacggactgtgcttttaagagtcggtctccaggttccacctccatcccttgaacgtgggccctctgaactcagcagcaccttgtcctgcttgatgcctcctaaccctccccaaactccaaccatctgcattacatctactggccatcccagtaaccagagcctaagtacattttgaagaatatagtcgaggcctcacaccctggctaaggagtaagctggtttttgggctgtgcagagccacgtcctactaactgtgctttaacatcccctgcagagctaagtcttagccaccaaggacaagaccaagcaagggggggtgggggagtggggaagtggcctatttaagacgaacctatcgatacccagagttcactggttcagttacttgctttcactagtttttagctttttaataaataagtagcaatgttctgggatgactcctggcagctgcgaaccctcattttagcaatagtctgcacagctccttcagcctgttggtctggctgaaatgcctctctccccactccggcttttgtctggcttgggccctcctggtcatcttgtcctaggcagcctgtggaggtctatgaaagccacacctccagccagctgatgctgcgcccgagtcacatggcaggcgccacaggcaaccccggtgctcacagggcatcagggagcacagcagcatctgccatggaggcggcttataagttagtgacatacagttatctcacttggtggcagtcacctttaggctaaagcatccaaatcccaggaagaaaatactcacgttagttgatggatgttggaaggcattggaggaaaacaccacagttaggactgttaatgacttacacactgttggtgagactcatctcgaacatgcgcaaacattgatcgtagtaacggtggtggtggttagtgccacattcaaataaaaatagttctatacaatatgttcatttggtcatgtgctatttacagattttacaaaacacacacatacacacacatacacacttgcccttatgttctctataccaggccagcagaaacttgcataaaatgtacatcacagatgacaattagtgcctgtacattaagaatacaattcctatgactacctacacagcagagcaggagccttcttcccctcaagcagagtacaactaaagttctgagctaagaactggagagaaagttggacatgtctgttagtcccaggtaagccacttacgagttaaagacaagacagttatttttctctgtccatttaaaatgttttatttttttaaaactagatgacgtgccactgaaataggcaatgttggcaaaacaatgtctgttacaataaaatacattagacatttaaataaataaccttaaaaactatgtgaagggacataaacccagtcgattgaatctggaacaatgttttctgcacaagcgagtacaggcatacctctcgttaaaactgatgtaaacagaacgaaccatcacaatcctaaagaagaagccaagcggggcgggggtaaggtggggagaggtggggtggggtggggtgaacggaggccaaagtgggtgagggaagtagcaaaccaaaacaatactgactgaggtagcaagactctgctcagtgcagaaaaattggcttatgaataaaaattagactgtgatatcaaattaaatccggatcatcatgcaaaagacacaatacatgctatttagttttagaaaaaaaaccacacacattcatttcctaaaatctgctgccaattaatttgctgacaatgtctgctggctcaactattttttttatacaaggatgagtattaaacagaacactgtacatgctttttcatctacaaaaaaatatttgcataaaatagtgttagttctctgtacatgtcaatggacactttaattatgtgtataaaaaaggaaaatcttgccccactggagtcagaaaaagcaaaacaaaatctagagtatgaaacctccatcaccagccagtatgttcatgtgaaaattcagcagaaatagacagttgctttaaacaataaaaaaattaattgattaagttaaacatcttctttatggaaaactgtcagtcaagaccagaacatatcgctaaagttagtgtctgtgctatagacccagatcaccaggggcattatgagcagcacaaacggccaggaaatcccatcggtgcatgccgagaacgagcaggatttggtggcaggctgcacacactctttaccaggttccaggtagttgcgggccacaaacttgagcgtctcatccatgagaatcacgggcaaggagattttcagcaccatcagccactgggtcacgttcagcggtgtgatctggaagatgagctgacacacagggaagacgtgtcacgcctccagcctcccctggaaggaggtggctggtcccaagccccacccaaccacttactggcaagggttcgacatagaggatcaggaagtggagtgacatggacaggcagatggagcccacgagccagatgttctcccaggggggcatcctcagcaaggactggttttcggacaagctgcagagcaaggagaggtggggaaacgcacccccaaggcaaggcacgtgtcacagtggcagtaagaccctgttggactacacttcagtaaggcggctgttaatgtggcaccatccgctgacctacctccactttctacagtggcaaagttgaagagaatgtcctaatgcaggacaaactgtgaattctgtatctatgttttggcatagcagaccccatcttagtgggttcaaagctgttcccaattgccctggagacttgggctatttagaaatttccatttttgtcacgggcttaactggatggtaccatttgtctgtgtgaaagggtgaggttccttccctgtgggtgctggcatacaggggtaccaaagttcctatttttggcccccacggtttcttttaaggaagagctcctaagaaacacagggctaagcactcccactacttcctggaggtgacgacagctcatgcttttaaaactggtattgcctgttctcctttcttttgggaagggaagaactgtcctgtgatcctcaatcaaccgtgactacacacaattccccggtgccctggcagtcaccatgctcgcctcagcctgccgtgaaggtgcactaacctgttgagggcgttacacatttctatagttactagaacagagagcgccattgtcatcgggtatggggattcaaagattgcacaatccacgccttcaaagtccgggttgtcctctttacactgtaggaaatgactctgcaagaaaatccaatcaaattcctatcagcccagtatatttcccaagtccaggctccaaccccataccaagcctagcacagaccagcctgaatgcagagccagccaagaggtttaccccaatttctcggagaagccctggtccttcagaatcatcttagatgtaactgtttattgtctgagtcttaagatgatttgatagataccgaaaccacagaaaggtcaaggcctcacaacacttctcatgtaaggtacagaaagaaaggtgactgagtaccagctggtagaaggacactcttggaccaccgtcagcagcaatgaaccaccatgcagcagcacccacggtagcagcgccgacgtaacctgggaacaaacacagtgatgctgatgcacttgcctctgcagggctcgctgccaccgaggccatgcaggccagtccccacaaggacgaagatcaaagacatgggacagtgatggtaaccggggcctgtggtgctaccaccacctgctcacgcctggtagccagagcaactagaccctggtttctgaaggacaggggtgtttctagaacagaagaactggataacttttcctccagaatgtgtgagaaaaagcacttgctccatcctgtgccaacctttccccttgccgtgccttctcccctcagtgggtagtacttcaaggctgcaagtgtgtgtgtactccatgtaaggctgcacagtttgagggactagattacaccaggacttttggacaaactattgctgcctagttgtacacagatttatttgctccattagaggcccagcagcagttttctagggaaatgctgtcaggagctagggtggaacactgagcagcatggccctgccctcagcagcttctgggattccccccagtattagctttgagttcaggaagtttattgcaaagaagcaacaaggtgcagcagagaatacacagagttcagacgaggcaaatatccccatgtggtagcatcaaaaacaacaagtgcatatacccactaacccacgaattacagtggagcatgaaggccgctggctgcaaggatgaggcactacgcatgtccggatatggaaggatctgacaagcaggaagaaggcaagacaagggtcaacatgcaggtgtgcacagcatgctggaatctctccggaagggcacagggtacatgagcacctcaacgccagagggaagtgactggcccaaaccctttccattctatgccattgtgtgctttttgaatttgaagtcatgtgaatatattatgaaaacacaatgccttcctatgggatcccagggaagtgatttcacctcactttcccaatctatgaaatggggaagaacccggggtgaggaagatgagggctaaagagatgatttatatataaaagggaccagccactgcgcaacccttctcttatggaaacagggactaaattttataacttggtgacaattatctatttaaatcccacctatgaactcttggaaggcagaacctagcgtgaatcattcttatccctttgcacagagggctcaatctgaaaaccctgatgtttaattgctcattcagaaaagcccaagtaagggcaggatgctaaaactggaactaactgtgaaaggactctggtaaattggatgtatagttcatcgaactgtaagagggcatctctgtcttttgctaccctatacggggatagaagaaaaaacacgcttttaagggatgaatttacaaaatttcagctcacaaacattttgtttaaaaatcagtaatataaaaaaattgtactcacagccaatagccaagtaacggaaaaagagccacccgctgatcaatggttcctttgggttccggggaggtttattcatgatgtccagatcaggagggttgaaccccagtgcagtggcaggcaggccatctgtcaccagattgacccagagcagctgaacaggaatcaaagcctcgggaaatccaagggctgctgtcaggaaaatactgtttccaatcaagaaaagaagacaaagagagcccaaatgacttctggccactatttaaagagcatcatcaacccgccctcctccagaaaaataaatgacaacaacttcaggtaatctgtaaaatacttatacccaattttgaattaaagctcaattttacttagtttattacttaaattcagatgactgaggccaggtgcggtggcttatgcctgtaatcccagcactttgggaagccaaggtgggcagactggctgagctcagcagttaagagaccagcctgggcaacatggtgaaacctcatttctactaaaacacaaaaaaatggcagggagtggtggcgcatgcctgtaatcccagctgttcgggaggcttgaacccaggaggtggaggggacagtgagctgagatcgtgccactgcccgaagcctgggcgacagcgagactgtctcaaaaaaataaataaaaataaaaaaattattaagctgactgagataaagccaacttttggagggcaagaatttcatgtgactacctggttaatgttagctcagtctcacgttaaagaggattctttgcacattggggcagctgcagacaaccctcccgagggccaaagcaccactgcttccataaggcatttctgtcttgcccactcccctcttccaactcaggcacaaagaccaaagctgctgcaatctggagagcaaactgcgagaactgggctccatgacccatttagataaaggcgtacagtaagtgatgctgtcacagagacctaccagacaacttccccgacgttggacgagatgaggtagcggatgaactgtttcatgttgttgtagattgcccgcccctcctcaacggcagccacaatggtggagaagttgtcatccgccaggaccatctcagaggcggttttagccaccgcagtgccagagcccatagcaatgccaatctcggctttcttcagagcaggagcatcgttcacgccatcgccagtctgaaagggaaagcaatggttgggtcagccaactggcatgccacattcatacccctaggcaaaagcccactgaatgggaagcaggaggaaaatgaatagagccgtaggtctcttggcaaagagttttagaatttttgtttcataagttggtgtcacaaaacacattttacctaggaaatgtaaaattaccaaataagtttaccgaagtgggacaaaggggacttcaaatttatctgtattatcttactaaaaacaaaaacacaacctatgtggcagtcaagaggaagcacttgtatccacatggataaatttcaagtagaaagatgcagattgcaaaaatatgcaaatttttatttttctgagatggagtcccgctctgtcgcccaggctgtagtgcagtggcgcagtctcggctcactgcacgcctcctgggttcaagcgattctcctgcctcaatctcccgagtagctgggattacaggcgcccaccaccacacccagcaattttttgtatttttagtacagacggggtttcaccatgttggccaggctggtcttgaactcctgaccccaagtgattcacctgcctcggcctcccaagtgttggggttacaggcatgagccactgcactcggccaaaaaatatgccttcaaaagcatgcaaaaataatactgtctacagacacaaaaacagcactcccatgtttttaatatttttgctaaattccaacttcagttacctctgggggagaggagagtacacttatagtatgtttcaaaactaagatttttttttaaaagagaagaaagtaaatttaacataatgtatctgggtgaaaatcaggtgaggggaagaatactggaaatgcttcatcaatagccagctcttaaagaacttaaaagcagggtgatccaaacaactgactgattacatcctcaattttcagaaaacttacaataaaaacacgtctcatttaaaaaagagactagatcaccagattgttcctctgggactgatctggaaggcccttctgggttttaaacgactctaggatcttccctgcaagtagcacacaacatgctaaccactgattcaccgaattctagagaaaagacccaaatcatgacaaattccaaattagggagctatgacaaaaaaattcagtggtcaaaattagaggctactatgtgcttgtgtagcctgagtcacctgtacatgttcaaacatgctcaccatagctgtaatctcatcaaaagactgaagaaattctacgattttagacttgtgggagggttcaactcgagcaaaacagcgggcgttcaggcaggcgtctcgctgggcggaggggttgagttcatcaaactcccggcctgtgaaagcttttgacgtcacgtcctcatcctgcccgaagatgccgatgcggcgacagatggccacagcagtgcccttgttgtccccagtgatcatgatgacccggatgcctgcttgccggcacagcttcacggaggaggccacctcgattctcggaggatccagcatgcccacgcagccaacgaaggtcagattggtctaaaataagagcatcactttaaataaaagtggcaagttctagtttttgtcccctagtttgaaaaatgcccagttaaacattgagacaggtttctgcattttttttctttttttttttttgaggcggagtttcgctcttgttgcccaggctggagtgccatggcgcaatctcagctcactgcgacctccgcctcccaggttcaagagactcttctgcctcagcctccagggtagctgggactacaggtatgcgccaccacacctggctaattttgtatttttagtagagatgtggtttctccatgttggtcaggctggtctcaaacccccaaccccaggtgatctgccagcctcggcctcccaaagtgctgagattacaggcatttgagccaccgtgcctggcggtttttgcattttcttatgagaaaaaaaaataccactacacccgttatcaaaccattctttaactcttgtgctattctgagcccacagtaccaaagcttcttcattttgttcatagctttaggatgtcacatccttgatataaaagaattctactctgagtagaaaagtggaagtaatctccaacttggatcttttgaccttcagtaactaatgaatattctagaaatgtcaccaatttaaaaaaaatcatgatttagatgagaggcaaaatggggtttacaagcttaagctcatcttgattattctactttgaaaatattctactttgaaaataacacttttatgaaattattaactatgtatgtttgaagcagcaaattttaagggtgacacagctggcaggcagaaaaacaaataaccacacctctttcttggcaaaagtgagaactgtttgaccttttgcttgaaggagtactgtttaaacacaatgaatcgtgcagggtgtggacaaagaaacttttcattagctaacctcatatttaataaagttggcagagtcctcaaggtgcatttcttctcttctcagtgggttgtcatgagtggccagggccaggcatcgcagtgtgtcgctgccactaccccactctcgaatgacagacatgatcttctgtttgactccagaggtcataggaaccttagtacttccaactcgaatgtgggtgcacctgtcaatgacaccttcaggagcaccctggaaatgttacagatttagataaacaattttgttttattggttcaccgggatcttaaccctggcaagaacatctcaattgcaatctgccatacttgccttcacaaacatcttgctcattgatgtcctgcttggtttatttggtgtacagtaaaccgacattgactttctgtcacgtgaaaactctagagtgaattcctttttcatcagctgtttaatgacctacaaagggaacaaatatggatactactgggtggcaatttctgaacttttttacctaacaagcagtaagcacacctattacatgacagatgctaggaatatagcaataaacaaaacagacaggtttttgccctcatgaaacttgtcccctattttgggagagacagactaagatgcaaaagtaacacaagtgctatagagaaaaagggaagggggatagaaaatttgcatacatacatatgaactgttacataaagtggccagaaggcggtgacatttgaataaagatggccccatggggcctgaaaagatgtgtgtgaacccagtgggtggtggtgaagacccaccaggcagagaacggaagtgcaacctggcaagtcctggaatggtaaaggagtgccaacgtggctggaatagagtttacatgagcaaaaggtgaggcaggtaatggcagaggatggtagaagcaggtcattaagacctcaaaagtcattatggggcatttggcttttaagacaagtaaaacagaagacaacggagggtctcaagctccagttgtcaagaattggctgaaggtggtcgggtgcagtggatcacctgaggtcagcagttcatgaccagcctggccaacatggtgaaaccctgtctacaaaaattagctaggtgtggtggcaggcacctgtaatcccagctactcaggaggccgaggcaggagaactgcttaaagccaggggggcagagattccagtgagatgagattgcgccacttcactccaccctggacgaaagagcaaactccatctcaaaaaacaaaagcattggctgaagggagacaaggaataccattcagtataatgacactgacttaaactagggaacgttggaggtgaagagatggccccaagcagagctgtccaccagaactctgtgaaagatggcaatgctctgtggccactgttcatgtggctgtcacacgtgatggataagcactttaagtgaatatggctagggcatctaaggaagtgtttttaggtattctaagtagttttagatagctagtggctactgattatagtaatgagaccagaagagatcatgggagtaactatagacagaaatggctgaggactatggagccttcacctcctggtgccttgtgaaagacccagctacaaagacctcgaatgagaggccagggagggagagcaagtatgggatcgtggaagccaagtgaagaggtgcttcaaagagggagcgagtgacagcaccaacaaaataggaagacgaagactgagaataaacctttggctttatatcgttacctacaactaaagataccccttctcttccagtttttgtacttttcttgcctattacacagaccaggaatgccagtataatactgcatagaaatggtgagaattctgttatgttagcatggtctctgtgtaaacacactgtcagcgttaaagacacacttttatagtcttagtttggtgtgataagatgcgtttcatcatatgcacctactgaggtgaccttattgttttttccaccttaatttggttaatgtggtgagttaattatatttgctcccactgacacacatttaaaaatcatcatagaaatccccaagaacatcagcatctaacctaggaagctacgggaggactgaaggctgatgaactgactagatggggctcagggccctgcagcgatcctgctggcctgccagccactgaaccgtctcaggcagcaaaggaatgggtatgagtgctacgctagattctgtatcatctcaatcacacgtgtgtttagtttcaattaagcatttgcgccaatggcactgggatgactaaaggaacacgcaatgattctgaggaaggcgtggacctacccaggtaagaggtcttgggctgggagtgggggagggaaatccctttcagtactaggctggccaagaaccacagacctcaccaaacaagccatggggccaaaatgctggacctgctctctctgcttctaaactacacatgggttcctgctgtctcaagtgggaagggaggcaaagagcttgtgtttggaactccttagtgaatgagcagcatgacagctgtttccgatcccttggccaagggatgtgaaaaagatgggacaagggagctctggagcagggagacacaaggatgacagtattgcccgtacttgtgtggtcactggctagtgagccagtgctggttcagccccattacatgacttgtttcccatcactcagtggagtagtcagaggtctagaatcaaacgactcaaaccctcaatctgtgaagctgttttcaggctgcctcagatttttagttacaccaactaatagatcacaggcagcgtggctctgccaggatccaactccttgcttactggcagagtgaataagcctggactgcttcgggttcatggaagacacatgggtagagggaagaagccaaaggagtggtccaaggccttcatggctttgagactgctatttgtgaattgtgcatcagtttactgaaaaggaatctatatttcagctgagacagtctcaattccagtgtgagttttgttttctcaggacagtataaaggagacaaaatgctgcctcacactaaccggaagaccacgccatacaggtcatggaagggctaggtgtccctaactgcaggctggacatgatggtctagaacttttcaccctgagattttgtgtggtcactaaaatgcctgatatttgaggttattaagaaaacaggtatactgctccctcccaactcaggctgtactaccccccaatgacacaatgcctcctcatttgcccttattatccaggaagggatgaaagggcttatgacatacaaaaagcattaaacgtggtgacaactaatcattttgctaaatgaggcttgcctttatacagctgtgtatgacaactagaaaaggctgagttttacctctctcctcccccagacctgttccttcaggcaggcagaacctctccccttcccatcgctccttattctaccagggaaccctaagttacaacaatgtcctataaagaggctgcaaaagtactgactggcagccccatggtgatgacagacaggtaggtctgatgctaaaaagaggtatgttcagcagaacccaattccataggaatccaagctccacagctaggagacagtgggcactgaggatgaggctgtttgcaggcaaatggtctggtggacctattagaggaccatgtggctgtgcagaccctggactgcagatagagggtattcactctaagatagtgtaggagggctcttgcccaacaagcaatcaccctgtctgccatataaaaggagcagctgctgctgctgccacacagctcaggaatgatgtttcctgggtggtggtttgtgggggcaggaaccagacatagactttgagagcctgacttacgtccctaagctccttctgctcctccctggctgctctgagagcatcacactccttcctccaatacaatcagcttccgcagttcccattcttgagctgcttctgtagcttgcttcttctctcccacctgtccttggcacccacgtgaccgactgacccacacagactttgtgtattgcaacatcttatctgcatatcacttctcatccaagcaatcatctaccactttggccaggataagataaagggagttatccttcaagtttagccacttcaggccttaatttttttttgagatggggtctgactctgttgcccaggctcaagtgcagtgatgctgcaacctaaactctaggcctcaagtgactctcccgcctcagcttcccaaagtgttgggattacaggtgtgagccactgcgcctggtccacttcaagttcttaagctgagccaagtgacaggcagggggaccagtcttttgaggagacccaggtgctagagactcaatggatggccattcttcaccagcagccgttgcaaagtgtttctactgaggtctaggctccccgggcttgtgaggccacagaaatctaagggcagtactgcaggacaggtccagtatggtggtcttggcaggagggagcagcagctctttgagaggaacctcactcaggtccaactcactgtggagactccccatccttgctactggcccttgtcatagtgatgctggtcgaatgagccctgtctcaaagactctgacaggcagaaaaaggctcagaggccacttatttgttcagtgtatacatgaacaatgtgggtgccctctgccactgccactgccactgccaccaccatcaccacattgacctttggtatttggttatgctggtctcatcaaatgagttaagaaatgtttgatgcccaggcgcggtggctcatgcctgtaatcccagcactttgggaggccgaggtgggcggatcacctgaggtcaggagttcgagaccagcctggctagcatggtgaaacccctttctacgaaaaatacaaaaaattagccaggcgtggtggcgtgtgcctgtaatcccagctactagggaggctaaggcaggagaatcgcttgaacctgggaggtggaggttgcagtgagccaagatcgcgccatggcactccaatctggtgacagagagaaactctgtctcaaaaaaaaaaaaaaaaaaaaggtttaattgaacaggaaaagaaagtgtggtagctgacaggggaaataaggtcaaaggaaagtttcaagatagaaagacactattatttccccctatgctgaagaacatctagtagagatggaaatcaataatgcagcaaagatgttgggaggaggtggcttctgctaggagcaagaacactgttcacagcactatgggagaaggcagcccctgtgggcccagagggtcgctcaaggaaattagctattgattgcttttattttcctggtcaaatacacaggaagagcatcttacctgagagtgaatatggggaaggaaatactgtaagtttgaggagataaggtataattagttttctaagagagtaggacagtgcagacactaagtatatatagtacgactgataagcagcatgaacaataaaccaggttcaaatactcactgagttgcaggcatttgcacgttctattttagaaagacccttcaattcggtatcaaatacattcatcttctctactaggcaagtgagagcagtctctgtagcttctccaactttttcatacacaccctttgcctgtattggttaaaggcacagaaagtagaaaaaagggagaagtacacagataaatttatctttaatattttttttccacaaaagcacaatctgtcctctattacaacactgtaaggccatttttatcctcctctgaaacaggtgacccagataattaaaaacatactcaaagtacaggtgtgcatgtgatcttattctaataagtaggtttttcatttcccttaaatataagatgacatcaaacacagtatttattatttcacccaaatataagaagccactgatcacactattaattcaaagagtgccttcacataataatgtaattccatgtcactgcttatcattctgaagagttcacattctgtctctgacagggactagcttacctttgagacagaaactatatcctttgctttcaggaaagcattttctatcctgggttttattcatttatagtaagtatgctatcaacagaaagaacatcacatatactacaactttaagttaactaactgcaatgctcagtcacagaggatatgtgaaaggctctcagctttctttggtgaggtcatgctggccccaccatcaggttctgaatggaagggggaaacaaaatcaggcacccttgactttcaaaagggaggaaggcaggctagactttcattccacccaccccacccttgaactaggaacagccattccttctaatttatgaagagacttacctcattgtaatccaaagcagagtcattacaaagagcacaaattgttgctaattctaccagaccatcatactggtgacaattcactggtttatcatctttatgcctgcccaaagagaaaacactcttagagcagggtatggtcgccactattgattcctcccgccccctgcccccccgcaattgtttaataatgaaaacagaatttctgggacaacatactggaaaaaattccaaacaatttgatgccagagccaatattagacaaaaacaaaagagagaatgcatctctggtatcagaaatcaatcagtaaaaagaccagaaattcttaattcaattcttccaccactggctacagtgaataacaaacacaaatccctcttgaaagtttggagcccagaagatgcaaaaagatgactggattataacctttggttcatctttcaaagtttttgttttaaaaacatttactactttagtaataagtgttgacttgagccacattcagaaagctgtcttaactttgtagacatgctgcaaatcaatacaaatactaaactgccacaccagatcctttaaatgaggaggagggttactcacacttctccaataggtgcataagttgatccagttatggtaaactcattaagggaacaagtatcaccttccactctgtccagaatgaacatctgtagggggagagcgcatcagagtatttaaaagggatttttaaaaaatgctacacaaataaactacctttgttagcttaggacaaaggcaaacaacctctttcatttacgaaaacaactttaataaaactcactgaggctcactcagcatcagcagtactgtcccttaccctaactagcttaattatattagactgcttcgcccatcacacccccgaccaatcgaacagtatgaaaaacagcatcactgaggtgctgaatgaatgagcagcagtggcaccaaagacacaacaacccacacaaaatccaagttatgaggactcccggtcagcaaaaggtcagttccagagacaagttactctttagattgctcagaatcccaaatttcaaatggctggctgtgagagtggtattaggtagtcctgccttagagctaagcacaaaagcttgggaagaataaactcacatttcagagttgcataaacatttcccgagtaaaataagacaaactgcttctctgctccttcccacttatttttattgtggcaatagctcatgttctatgaagctgcataactatatgtatacagtaaggagcccgcagagctgaatgaattgatgttccctagacaatacagatggaagcatgcttaggaaaggattaattttattttttaaagcgacataagctattttcttaaagataatttttccactgcttgatttgcattcacaaattataattcagaagcccagtttggaaaagtaagatttaggcttgtgttttcattgcaaatgaaaacttgtaaaacctcctctaaaaagaaaaaattacagaaagtgatgtcaaaactatattttctcgtgctttctctgaaatatgagcaattaataatctgatcaaatcattctctaaggggaatttaaaaaatgtaaaactcaagttaaacaggccacgttgagctgggcacggtggctcacgcctataatcccagcactgagaggccaaggtgagtagatcatgaggacaggagctcaagatcagcctggcaaagatggtgaaacccgtctctactaaaaatataacaaattagccgggcgtggtggtgggcacctgtaatcccagctactcaggaggttgagggagagaagtgcttgaacccgggaggcagaggttgcagtgggctgagattgcgccactgcactctagcctgggcgacagagcaaaactccgtaataacagcaacaacaaagctatgttgtgttttaaaaacacatcttttcagagcaattcatctcacattcaataaggaaattagttaatctttattttaaaataacttttttttttttttgaggtggagtttcactctgtcgcctaggctgggtggactgcaatggcacgactcggctcactgcaacctccgcctcccgggttcaagtgattctcctgcctcagcctcccaaagaaattataggcgcctgccaacatgcccagctaatttttgtaatattagtagagacgaggtttcaccatgttagtcaggctggtctcgaactcctgacctcaggtgatccgcccgcctcggcctcccaaagtgctgaaataacaggcgtgaaccactgtgcccagccaaaaatgtgaaattctttgagtctataccaaagcccaaaatattctaaaagacattcagaatctgaatctacattagctaaatctaaatgtacttagacatttttgactgtgagcaagtcaaccatttaggatatgcaggatgaaaatcttcctaagtcaagggcagttatgcaataccactgcaagaagcctcctgcagaataccaattagcaccagcttcctgttgtgaggtagagcttcactcagaacaggcaggctttttctttattataagaaaacattttaagccaagccattcaagggagaaaagaacaaaaaaaaattatagtgaactgggaaactgaaattttaaaaattacaattttacacatggctttacacatggcttactttcacagacataaagactattctgaggaattaaagctttcaggctaagtgagacacaaaatcgtaaataagaaaattccctttctcttcctgaaacaaccagtatgacaaaactgacttttagccaattcatccaaccttttggttccaaaaaataagaacttaagtagctcaaacaccttaatatcctggagaaacctaagacaaacctagaagctttccactttgaaagttggaacaccccagttctgtcaattctaaatgtgggtttggacttcacaaggagcttgcgggggagggagaacctgtatctaaaaaatcatcatgagcttaaaattggcaagataaaaattcacagggcttaactgattataaaacaatttccgatgttaaaaataattatctaaaacctgacaaaaaggccaagataactacaccctttcaatatcatacagaagcattatttaacaagcccattctaggaaaatgtaacactgtgttactaaataaatgctcatgttatatgaggtttccctgtaagacattagttttgtaatctaacctagcaatccctattctaatattctaatattgaacacttcctcaaatacagattcccttgctaattaatgagccgaataaaatatgtgacaaatgtctactctgtatgagtcatgtgtaccttttggaatagacttgtaccaagttgtttaagcaaaacctaaggaaagtgaattatacaaaataatccagctgtataattattgcattatttattcagttgttacttttctaacagcaggtttaaattatttattttatcaaatgatggtcaaaaaatataggatggccgggcgcgggggctcacgcctataatcccagcactttgggaggctttcaaaagcgggtggatcacttgaggtcgcgagttcgagaccagcctgaccaacatggagaaaccctatctctactaaaaatacaaaaaattagccgggcgtgggggcgcatgcctgtaatcccagctacttgggaggctgaagcaggagaattgcttgaacccagaaggcggaggttgtagtgagctgagatcgggccattgcactacagcctgggcaacaagagtgaaactccatctcaaaacaagaacaaacaaacaaacaaaaatatatatgatgaatacacagaataaagcaagttaaaagcaattttagtcagccctctgtacctgtgggttccacatccacggtcaactaaacagcagatggaaaaaataactgcatctgtactgaacatgtacatttttttcttgtcattattccctaaacaacacaggttaactatccctaaacaacacagtttaactatttacatatcatttataatattacgttaggtactgtaagtaatctggagatgttttcaagtatactggaggatgaacaaggttatatgcaagtactgaaccatttcatttcagagacttgagcatctgcagagtttggtatctgagggaggtcctggaaccaatctctaatgaatacagagagatgactatctactttttgagaaaaagcacgcttcattcaacatgtgatagaaaaaccaattaggacttcaggtagggaggttaactagcagctttctctagaacttgtctattaacatacacctagagacagaggatcaggaaaattagaaaggaggctgagtgtggtggttcatgcttataatcccagctctttgggaggccaaggcaggaggatcacttgagcccaggaattcaagaccagcctggtgacatagtgagaacctgcctctacaaaaaaaaataaaaaaactagtggggcatggtggcatgcacttgtggttgcagctacttgtgaggctggggtgggaggacttgagcctgggaggttgaggctgtaagtgagccacagctgtgtcactgcacactagcctgggcaacagaatgagaccttgtcttttttcttttcttttctttgagatggagtcttgcttgtcgcccagaattgagagcagtggtgtgatcttggctcactgcaacctccgctgcccaggttcaagcaattctcctgtctcagcctctcgagtagctgggactacaggtgcacgccaccactcagctaatttttgtcttttcggtagagacagggtttcaccattttggtcaggttggtctcaaacttcggacctcaggtgatccacccgcctcggcctctcaaagtgctgggattacaggcgtgagccactgcgcccaggctttttttttttttaattaaaggaaaatataatttctctaattctcttacatctaatacaagtatatcagccatacagatatcctgtattttgtgaaagttttaggaattaaatgattagatcctctcaaatattagaaattaagctcaggctatacatacagcccacagaaatgtatgaaattacaaatcaaaagttttgatggcatgaaggcatattggtaggatgaacaaagaaccacgacacggaatattctaaattactcctcttaccctgcagactgacatctggtttgttgtaagtgtaccagtcttgtctgagcagataacagaagtacaaccaagggtttccacagacgggaggcttcgaacaatggcatttttctttgccattctgcgagttccaagagccaggcaggtggtgatgactgcaggcagaccttcaggaatggctgctacagccagggccactgcaattttaaagtagtaaatagcacctctgatccaggaccctccatgaaccgggtcattgaagtgcccaatatttatgatccagactgcaatgcaaataagggagatgactttggaaagctgttccccaaattcatctagtttttgctgaaggggtgttctctcctgttctgttgccaccatttcatcccggatcttgccaatttcggtgttaactccagttgctaccaccactcccatagctttcccagcagcaatgtttgtaccctaggacagaagtagagaactggtcacaagatgaataccacatcccaacttaaataccgacgctggtttttgactagggcacccagattctctacacattctactaggtcttccactggctactgttcaagcaaccagccatacaactgtgacaacaagcaatgctccatgtgctacttacttatgtcaggcagctctgtactgacccacctagatttctatttgagcccggcttgcagaccatcttcaagcagtgctcttaacccctctgtgttcccaatttttcaaactcatatagttcaactctaagcattctccacttctggctccaacaactcaaggcccctacttttctcactgtaatagaaacggcaactagccccatgggctatcttgacaacccctactcatgtgacagggtccaaaaaccaaagaaatcaaatgtgagcagtctctcccatgccactttaattcctagtgttataagagaaggacatggcttcactattttcagggtacctctatttacttactatgggtagtagtcaggttctcatacaaacccacaaatgtccccaacttaaaatcatttcctcactattcaaagaatttttcacatcaatagaaaaagtgaaatagtaaaatgaacattcatatactttgcacctagactcaccattattaatggtttgccatgtttgctttctctctctctctaaacacgcacctttttattgtgaaccacatacaaatagcagctgtcatctacatcattttgaaaataccctttattggctaaggcttttccaaacaaatctacttttcaactatgtttgcaggtaagagtttgaagatgtataagctagtcattattttttggtcccccaaaacttgccaattaaaagacatctaagtcacacgttatgttactgccatattctgacacctaagactgaccatgaaaagtgtgattatcctttagaatgatagccagtgatggttggcagtgaaaaacataacatttgattaggctttggaaatgtctgtaaataaaaacacatttcataaagtacttacagaaaacagcatgttctttttatcttggttgacagctcgtgggtcagggacgggatcagtgtgcttgatgacagagacagattcacctaagcgggttgtgagacagaaaaaacagatctctgcgacccacaccaagaacctagaacctctcattcatgcccacccattaccactcttgggatactgttagtgtgagaaaaggttggcaaaaggcccaattcattcaaaggaggtaagctgggaaaacttagtaatggaaattaataccagaacaaagggtgtcaggataaaaatcaacacaattccaaaataaaaaagtgaattttcaagtagaatccccattgattattttctggagtaactattcaaattaatttatttttcagtaatcattttatactctgatactgtgactgtattatttacatatatttgttgtatactttaataaatactttaacatatatactgatactttttttttttttcgagacagaggtcttgctctatcacccgggctggtgcaatggcaccatcacaactcactacagcctcaacttcctgggctcaagcaatcttcccaacttggcttcctgaatagctgggattacaggcacccaataccacgccgggttaatttttttggtatttttttgtagagatgaggttttaccatgttgcccagggtggtctccaactcgtggactcaaacaatttgctcatcttgtcctcctcaaagtgctggaattacaggtgtgggccacatctggctatgctctggagtagcaattagcaagtgtactggaaagatcgcatggtaaataaagaactactttttttttttttttgagacggagtcttgctttgttgcccaggctggagtccagtggcacaatcttggcttactgaaacctctgcctcccgggcaattttccagcctcagcctcccaagtagctgggattacaggcatgtgccaccatgcccagctaatttttgtatttttagtagagacaggttttgctatgttggccaaggctggtctcaaactcctgacctgaggtgatccccccacctcggcctcccaaagtgctgggattacaggcatgagacaccatgcccagctgatttcaatttaaaaatcatgtcatagatatataattagggtcaatctgagtaaaatatgtctctaaatgttactttaagttacaggtagcaaacttcactctcaatatttgaccaaaaaaattggttccacaagttagccaaaaactacattatgatttcttaatgaaagaaagataatattcgagaacctctatgaagtttaaatttttttttaaacttttaaagttttttattataggctgggtgtgatgacttatgtctgtaatcccagcactttgggggtttgaggcgggcgatcacttcaggtcaggaggtcaagaccagcctggacaacatggcaaaaccctatctctactaaaaatacaattagccaggtgtggtggtgcatgcctgtaatttcagctactagggaggctgaggcatgagaattacttgaaccccggaagcagaggctgcactgagctgagatcgcgccactgggccacagagtgcaactctgtctttaaaaaaaaaaaaaaaaagattttcattatagagactataactgctctctcaaactcttggccacaagtgatcctactgccgcagcctcccaaagtcctgaaattacaggcatgagccaccgtgaccagcctaaaaagtttttaaatgcctgtaatcccagcactttgggaggccaaggcaggcggatcatgagatcaggagttcgagaccagcctgaccaacacagtgaaaccccgtctctactaaaaatacaaaaataagctgggcatggtggcgcacgcctataatcccagacactcaggtggctgaggcaggagaacagcttgaatccaggaggcagaggttgcagtgagctgagatcacagcactacactatagcctgggcaacagagcgagactccgcctcaaaaaaaaaaaaattttttttaaatggcaactacgtctttagggcacactatgagaatttcacacatataacccaaccatttctccaacattttatggcttaattggcctccagcttgttgttgctaatgagaattttaataagtaagctatttataaagaaacaataccaaaaaaaatagagccaggttactcatataactgtctccatgacattagctgcttttcaaaattgataatcagataaatcttgagagcctttagactttatgtttactatttaatccaagttagcattgtatttaaagttaattcttctgacaaacttacttccagttagtatgaaccctccaccctagattgtgcttttatcacacaaaaacgggaaaatgtttcaaacaattgtgcaaattccaggtagtacaattttcatctcttatgggggctaacttttgttcattgtgtatttggatactgtaaagattgatacaacattagcactcctccagtgaaaaaaattacagcactggagtctatttttcttgcctggaaaaaggacatcgaataagtaatttgctttccacaaaacagacaacaattcaaccttaagatttacctatggtaacgaacaaattacaacttttttttggagacagagtcttgctctgtcccccaggctggagtgcagaggcacaagcatggctcactgtagccttgacctaggcacaagtgatcttttcacccagcctcctgagtagctgggattacaggcctggctaatttttgtattttttgtagatacggggttttgccatgttgcccaggcccgtctttaactcctgggctcaagccatctgcccgcctcagtctcccaaagtgttggaattacatgcatgagccaccgtgcccagccattttgttttgtttttaaatcatgcctttaaaaccgtatcggcagccaggtgcagtggttcacgcctgtaatcccagcactttgggaggccgaggcaggtggattacctgaggtcaggagttcaagaccagcctgaccaacaaggtaaaaccccatctctaataaaaatacaaaaattagctgggcatggtggcaggagcctgtagtcccagctacttgggaggctgagacaggagaactgcctgaacctgagaggcggaggctgcagtgagccgcaatcacgccactgcactccagcctgggcaatggagcgagactaaagcactaagaaataagtatcttagagaggattaagatgggataccataaagggacagtgaggcaagagccaactctattggcatggaatatgcgaaggtcttcagaaattcaatgacttaatatatcatatttacctgtgagaattgactggtcaactcttagtgtggtagatttgatggaagttaaccttatatcagcaggaactttgtcaccaactaattaggagaaaaaaaaggcggctgaaatgagcaacttttaaaactatgttatctaaagatgaatttgtctccaaatcaatttttaaagaaaataaatgatctgcatataacacaaatacataaaattcagttaaaacaagcaaagtgatcaacctatcttggagtcataaaaaactttagatggattcaagatttgaattaggaaggaagagaatgaggcttaaggaaacctaactacattattctaagaaattttgctctgtatcttcagacaggccttcaagctttcactttaaagaatactttcctacttagcagtaagtaaaagtcttactacatatacacaaggcacagcaaagagaataaagttgtatatgccatgattcattccatcaaaaaagctaaattattgtgaacaggaagcaaatggccccctttaaaaagatattcaattaacgaaacacatggcaaatgcaaaataaaactacacagtaacaccactttttttttttgagacagggccttgctctgtcacccaggatgtagagatcagtgaggcaatcacagctcactgcacccttgacctcccacttcagcttcccaagcagaaggactacaggtgcacaccacctgggaaacaaagctagtctccatctcaaaaagtaaaataaaataaaatgtttatttccaagttaatcttagctctttcactgtttcaaaccctttgatatgctcgtataacatgtaattaattcatactaaaatgacaacttccaatggtataaagaaacacctctgggaaggtgtagcaaactagtaacactgcacagctggggcatatatcctttgatactttttgaaatatcaattaatgggaggctgaggcaggagaatggcgtgaacccgggaggcggagcttgcagtgagctgagatcgcgccactgcactccagcctgggcggcagagcgagactccgtctcataaaaaaaaaaagaaatatcaattaaatgaataataaacctcttgcataacctgaagatctttaagtcaactgagtcttctttcctaggccaacaagttactttaatagctcttaaaaggcccaaatctcagcccctttccttgatgtgtgtacaaagtgaaattccacaacatagcccaagtaacagacaaagccatgcaccttgagaatagtgcccagccctctgctggtattcaaatactgctgaatgagtggcacaatcacacaaagcagctggacattaaaacagctgtccgttaatcccaacactttgggaggctgaggcgggaggatcactcgaagctaggagttcgagaccagtctggccaacatggcgaaaacctgtctctactaaaaatataaaaaattagctgggaggaatggtagtgtgcctgtagtctcagctactcagacggttgcagtgagccgagttcacaccactacattccagctttggagacagagcgagactttgtctcaaaacaacaataataacaacaaaacagctgtccgtgattttctgaaagataattaaggtggtttgtaagtcttacgaaagggcagctacaaattacataagaaaattctcccatacttgcagatggcattttaaaatcaaatcatttttcagacttactctctatactgaattgcatgttaccagtcatatacaaaatggcaaaatagcactcctgtccaagaagtaaacattgaatttcttattttttattttcttttcagagacagagtcttgctctatcacccagactggagtgcagtggcatgatctcagctcactgcaacctccacctcccgggttcaagcgattcccctgcctcagcctcctgatcaaccgggactacaggcgtgcgccaccacaaccagcctcatttttgtatttttagtagagatagcgtttcactatgttagccagactgatctcaaactcctgacctcaggcatccacctgccttgcctcccaaaatgctgagattacaggcgtgagccactgcacccagccaacactgaacttcttaaaccttcaaattagttctgatttttctctacttcggagcttaagttcagggagaatatggtttacttttttaatttgagtgcataaaaacaatgctatagcctaagtaagcaatgtggtcacaaggcggcacagtttgtcaatatataatctcaacaggcaaagatcacccttgcatttgactgcagggacacacaagctaaggtgaaattcctgctggaaatgcttgtgcaatgaacagcaatattcagactgaatcaacgagaacctttcattttaatataattctgctctaactacattgaagagagtacatctaacagatgatttaagacaacaaagtaactatattctaaactttagtggtctttaacagctaacatgccctatactgcactatttctgcctgtcatgattaacctgatcctacatgccctcgaacatttcaaaaagaggacaagttcaatgatgaatattatgaccctaaatggaaaatttatttccaaatgttcctttggtgtctgaggatttgatttacgtcaatgtcatgatcctatggagtagaagacttctgtccaatgtgagatagcggtcgtcaatctataagcactattttacttctgcattgtaactgctgaacagacttaaacaattcaatatataaaccctagctcatactctcatatacttgacaaattttaaaaggtcaacaaatctaatatttaaattgagtacaacctacaagaggatacaaaagcaatgttttggcatgtgttttgctgtgtttcagtggaagctcagaggatttgaaataaatagaaaatgtatttttcaggtaagaaataccaaggttaaatttcctgggtaacactgccaacatattacaggttgagtatcccttacccaaaatgcttggaaacagtattttaaaattaaaatttggagtgtttgatttatattcttactgttgaacatctctacacaaaaaactcaaaatctgaaatgctccagtaagtatttcccttgagcatcatgttggtgctcaaaaagtttctgatctttgagcttttcagattagggatatccaatcgttatctaacagtattaggtaggaccaatactaaatatacatatttagtatatatacacactgtatttagtaatggtcctacctaacactaatagatacacctacaggaccaacaggtagtacaggactataggtcttacctattggtcctatagtataaatatacaatatgtgtagtatagatttattatatatagtattaatatataatatagtatatattatgtatatgaaagattatatttatactggcattataaggaaaccaacatgtactctttccctttataaaggtctactaaaatatatgaaaggtgtttctttgctgtgcagaaactgtattgatacacatttaacttttggccaaatactgaggaataccttaaatgtcaaatgctagaggaacaaatgtcaaatgcctgggaaacccttaaatactgaccacagctgttctaaatgtttccatcttacaacttccattctaatcaagtggcaattaaatatttagaaacgacaagaagagttatctggagatcttttacagattctttaagagtatgattaaatgcatttggagtggggtctaggaatccactttttttttttttttttttttttcattttttattcttacagacagggtctcactctgtcacccaggctggagtatactggcgtgatcacggtgaactacagccttgaactcctgggctcaagtcatcttcccacctcagcctcccaagtaactaggactacgggcatgtgccattgcaccaggttaattttaaaattaagaatccatatttttaaaaaggttttacaaatacactagaaaaattaatgcaagagaaaaaatgcaatagctagagtcatggatcctatgaacagcttttctgttgtgctgtttctcatctatcaggcacaccaactcgaagctaaaaagctccaaagcctcccaacacttgggaaatatgctaccttagagtttctatgtttaattggcttctattagaaactgatctttgtagaaagatattgaagaaacataaatccaaaaaacctgccatagactgggcacggtggcttatgcctgtaatcccagaactttgggaagctgagacaggcagatcacctgaggtcaggagttcaagaccagcctggccaagatgatgaaaccccatctctactaaaaatacaaaaattagccgggtgtggtggtgggtgcctgcaatcccagctacttgggaggctaaagcaagactatcgcttgagccttggaggcggaggttgcagtgagccgaagttgcgccactccagcctgggtgaaagggcgagactccatctcaaaaacaaaccaacgaacctgccatattctagtattttcttagctagagggaccatcacatcatcttgaccaaccaatgtcctcttcattttatgcacaggaactcaggctaggaagtaaaagtagccttctctaaggaagctcaattaatgaaaacctttgtttaacttgctgtgtgactgttacattccttttgttgatatcagagtcaatttagggttgactctattaggaaaacaggttcttagagttaaaaggttcatgaaagtaaaggtccaccgaatacttttcaagtgaagacacaacaatttccctttgtctggagaggcttctgtgaatttcagacaaaggattttgtgcatgaagagcaggctaggctgttccgatgatcacatcctgtaacatttccctggtgaggcatgtcaatgctcttagggcaagtggtagtggaaaattcttactcttgccaaagggatgctctgcaattttttcttccaaatgtttttctctgactctttgggtggaggcaggtacaataaaagaataaactctgaattaccttccatttaacatctgacacctttcaaattcagctcttgaaaatccacagctctttaatttgctattacaataaagatttccaatcagaacaaaatcctcacagtatacttgcacaagagttcaagtaagagttcattaaattatcagtttgccacgttttagaactccatgcaaacgtttataagccatgatactgaaacattatttgtaccacttatgtcaaatataaatactgatggttaaaactaccattattcaagccgggcatggtggctcacacctgtaatcccagcactttgggaggccaaggcggacgaagcatttgaggtcaggagtttgagaccagcctggccaacatggtgaaactccgtctctactaaaaatataaaaattagcccggcatggtggcgggcgcctataattgtagctacttggaggctgaggttgcagtgagctgagattgcgccactgcactccagcctgggtgacacagtgagactccatctcaaaaaaaacccaaacaaaccaaaaatcagcattatttttttaaaaaatcctttttattaatcaattgtattatgcattttaaaaacctaatttattgtggcaaacaccagttattaaaatcttttataagaaaaacactatttaagaccagaaattaccttctaaatgccactgttgtttttgaatctaaatggctcctaggaaacacaaggcataacagatttatcttaaactacttaaacatttaactgtgactcaaaattttcaccgtgtttccaatttgagtcataaattttgtagtttagcagagactgaatgaaattcttcatttgagaagctctacttgactactttaaactacttccaggcctcacggtgaacagggaaggaacattacacaataccccattatactactgtggtttgctcccaatctgtttcttagacagtactgtctttaaaatggcaaacgtgatctcctcctgttttaaaatctttcaacagcttctttggcatcccaacccgggcttataacagcctccatgacccaagtgctgtttgcctgtcaccctctcacctccctctgagcatcacacactatgctcttcagttcctctaacttgtttctgggccttcacataccctttcttctcccataaatagtaaggctttcctctaactcccagattaggctggcatccctcactgtgtgcccacagagcatcctgtcctttccttacactcgcatggtcttcatgaatcttccccactaaaaccaaaagctccataaaggcagagtcactcagacatcactgatttcctagccctaccactatacctggcacacagtgggtgtcaaataaaatatctgtcaatgaataaagcatttggcacacatatttcctttagtatacatgtagcaaaagacttctaattaccaagttgaagaacatcacgaagctagaaacaataaaaaatcagggtccaaagagataacagctttggttaagctaaatgaggttcaataatggtagttgcttaaattctacgtttagactaaaaccaaaataatctatgccagtaaaagtctagaaatttaggaatggggggatgggaagaacacctaagaaagactgtagttttagctggtagagtaattaagactgccaaagaaatttccatagactgtcagaagacaaaaaatgtctagaatgacaaccagactccatttacataactgcattcaatctgggtaccaaagagaactaccaagatggtaaagcgtttgaaacaaatgctaagactaacttggaaataaacattttattttattttactttttgagatggagactagctttgttgcccaggctggagtgcagtggcatgatctcggctcactgtaacctccacctcccaggttcaggcgattttcctgcctcagcctcccgagtagctgggattacaggtgcccaccaccacaccaagctaattttgtttgtttgctctgtcacccaggctggagcacagtggcgtgatctcagctcactgcaacccccgcctcctgggttcaagcaattctcctgcctccctcccaaatacctgggactacaggcgtgtgccgatgcggccggctaagttttgtatttttagtagagatggggtttcaccacgttggccaggctggtctcgaactcccaacctcaagtgatccacccacctaggcctcccaaagtgctgggattacaggcgtgagccaccgcacccggccaaaaataaaaattttaggatacgctatactgctaacatttgacagtcctagtactgccacaaactgccacatgctcctggataagttacaaactctgagttttagtcttctcatcccctaaaataaggtttcataagctccccttcagatctaaactggtgataaatcagatttctatgtggctccaaattaaaaaagctaacatacacaacagacaaaatatattttagctcataaggaatattttataatgaactgactaaaaaaatgacactgatcattaagcaagtttccagttactagagttatgggggtagaaaggtaaccaattcattagatgttgcaaaggcaaccatgcactaagcaatgttagagtactccagcctacctaccaacagagatttttatcacaaaagaaaaatgcacgtttaaaaggtcaaacaccattcttcttcccctctttcaacagatatatatacagttaacagtatattgccgggcgcgatggctcacgcctgtaatcccagcactctggaaggctgaggcaggcggatcacaaggtcaggagaacgagatcatcctggctaacatggtgaaaccccgtctctactaaaaatacaaaaaattagccgggcatggtggcgggtgcctgtggtcccagctacttgggaggctgaggcaggagaatggcatgaacccaggaggcggagcttgcagtgagctgagatcatgccactgcactccagcctgggcgacagagcgagactccatttccaaaaaaaaaaaaaaaaagtgtatcttctggattttctggacatctctttatgtacaacattcactaaaacaatattagaccttttatatttatacatacctgtctcattttaaaaagtggctgtatagtaataataagcaatgaaattttgagactattatttctagaccaggtactgctggaacagcttcacaggttactaattcaatcttcacaactctaaggagggatctattatctttactccctccctgtttatagatgaggaaaatgagacactaaaaggtacttgttcaaggccacagtatttcacaaccataccatgaactaaatgaatcatcctctatttttatggctatctagttatttctaacatttccttttacggtgttacagggttaacatcttcgtctgttatcttttacttttgcatacaaatgtatactcccaccaagtttatgtccctcctgtttccccattctctcaatcttgtatttttctggcactgataatgccaagccctttgttttactttttttttttttttctttttttgagacagagtttcactcttgctgcccaggctggagtgcaatggcacgatatcagctcagcacaaactctgcctcctgggttcaagtgattctcttgcctcagcctcccaagtagttgggattacaggcaagcgctaccatgcccagctaattttgaatttttagtagagacagcgtttctccatgttggtcaggctagtctcgaactcctgacctcaggtgatctgcccgcctcggcctccaaagtgctgggattacaggcatgagccagtgtacccggccaccaagcccttggttttcaaaagttccattatcggccgggcacagtggctcatgcctgtaatcccaacactttgggaggctgacggtgggtggatctcttgaggtcaggagttcaagaccagcctggccaacatggtgaaaccccgtctctactaaaaaaaaaatacaaaatagccaggtggggtggtgcacacctgtaattccagctaatgggaaagctgaggcagaagaatcgcttgaacccaggaggcagaggttccagtggtccaagattgcaccactgctctccagcctgggtgacagagccgagactttgtctcaaaaaaaaaaaaaaaaaaaaaagttccattatcttttaatataaaagttggtcacagttaaatctgcccatctaggtggtttggtgttaatgcttaggaaaggtggttcccatggccagcagcggtggctcacacctgtaatcccagcactttgggaggccaaggcagatgaagcacttgaggtcaggagtttgagaccagcctggctaacatggtgaaaccccatctctactaaaatatacaaaaaattagccggacattgtggtgggtgcctgtagtcacagctaacggggaggctgaggcaggagaatggcgtgaacccaggaggcggagcttgcagtgagccgagatcattccactgcactccagcctgggcgacagagcgactccgtatcaaaaaaaaaaaaaaaaaaaaaaggaaaggtggttcccaaaccacatggtttcttctcctttttccaaaatcttcatctcagtagcaagaatgaaaaggttggcacttcctggtactgtgactaccactgaatcatggggagtagagaggaggtgattacaggaaatcaggaaggaaatgccagccccatgaaatcaggtcaggcttcaagatcaactggcctatcatggtctgatggttgaggagaactctcatttctcacagttcttaatgtcttagctattctgacagtgctcaggggctctcaaactcaaaaactctctatgctgatttttgttttagactattttgctcttctgcttatccgttttctagagtaataatttataccttggctttggaaacagaggtatagcttccaggatttacagaacaactaaagcaatttttcttttttgttttgttttcttttttttttttttttgcaacagagtctcgctctgtccctcagggtggaatgcagttgtgcaatctaggctcattgcagcttccatctcctgggtttaggcgattctcgtgcctcagccacccaagtagctaggattacaggcatccaccaccacacccgggtaatttttgtatttttagtgaagatgggatttcacagtgttggccaggctggtctcgaactcctgggctcaaatgatccgcctgccttggcctcctaaattgctgggattacaggcatgagccaccatgcccggcctgtacttcagttttcaaaactaaatagctagaatcctgaggtggactttctgaggaggaggacaaatgaacctcctgaagttgcacacaagattttcaatatatgtttttggggaagaaagtccataaatttcattaattctcaaagggactgtgatctagaaatgattaagatctgctctagagccttgctactcaaattattgacctgggagcttattagaaatgcagaataatcaggccccatttcagactgaaccaatcaaaacatacattttaacaacatccccaggtaattcctgcacacatgaagttagagaaacattgatctaagcagtgtgcaaaatcttaaggctccccaccccccgaactttttttgggagacagagttttactctgtctcactctgtcacccaggctggagcatactggcacgatctgagctcactgcagccctgacctcccaggctcaactgatcctcccacctcagcctcccgagaagcagggactacaggagcacgtcaacatgcccagcaaattttcattttttatttttttagagacggggtctttccatgttgcccaggctggtctcaaactcctgagctcaagtgaacctcgtctcagcctcccaaagtgctggcatgagccatggctcccagcctcactatgcaagtttttaaaactttttttgtaaagacaaggtctcaatatgttgcccaggctggtctcaaactcctgggctcaagtgatcctcctgccatggcctcccaaaatgctaggattgcagggataagccactgcacccagccaacacctttttttttttttttttaaacaattctcttttcatattttacaaaagactttggtacagagattgttgtggcccacaaaacccaaaatattagctggacgctatagctcacacttataatcccagcgtttttttttttttttttttttttttttgagatggagtctcgctctgtcccccaggctggagtgcagtggcgcgatcttggctcactgcaacctctgccccctgggttcaagtaattctcctgcctcggcctaccgagtagctgggattacgggttacgggtgcctgccactgcacccggctaatttttgtatttttagtagagacgggggtttcaccatcttggccaggctggtcttgaactcctgatcttgtgatccacccgcctccgcctcccaaagacctgggattacaggctaaggcaggaggatcacttgaggccaggagttcaagaccagcctgagtgacacagtgagacctcatgtctataaacaaacgaaccaaccaaccaacccacaaagatagtatgccaactcctctgctctacagcagactgactactctgttttgtgttaaagagcatttaatgtttgctaaatgtttaaagccagtcaattccaaccccaacagctttctaaaagcaaaaaaaagtccacatggactcatggccatactatctaaatcacactttttagagcaagaaagctccttgaaacagtactccaattacctaattctgcagaggttaatgtacatagtccaatgtcatgcagaactaggatcataatccaggttcttatatgaatccactcatctatttcacaactctgccttttactcaactgcttcaaaagcagtttatacctgctactaaatctcagtactgcatgttaactgtctgaagtaaaagtttccttcctttaaattgaaagttttcttcctttaaattgctgtcaagtttaagaattattctttttattcccgagtaaatcttgaaattgctggcaccctgttggctattaagtcttcattttaggaaataaaattatcaatttctgtacaagtgctaaagcaaatgcaattttaagattgtgttgcttccactacttaaatcttaaaagatgattcgctccagagtatatactacaagacagaagtcatctgagaatatttatttcctggtgctattcatcaaccctgggttaccaagatacataaagtttgttttaaacaaccctgaaaacagtgttcttaagaagtcaataaataacccctgcggcatatactagaagccccaaaattctaaaactaagacttctagctgggaatggtggctcatgcctgtaatcccagcactttgggaggccaagggaagaggatcccttgagcccaggagtttgagactaggctgggtaatacagggagaccttgtctcaaaaaaacatcccacaaaaccatggccgggcacggtggttcatgcctgtaatcccagcactttgggaggccaagggaggcagatcacttgaggtcaggagttcgagaccagcctggccaacatggtaaaatcccgtctctactttaaaaaaaaaaaaggaaaaagaaaaaaagaaaacagaaatgacttaggctattatagcttgattcactttcatgtcagcagataatacagaaagcttaaaaacaatgacgttcatttcttataagattatgtacaacttcactacttttggtttccatccatccggagaaatattttcttggccttaagataatgtagaattactgtggcttcttaagaggtgaacatgtgggtcactttctcttttttttttttttgagtcagggtctcactctgttgcccacgctggagtgcagtggcttaatttcagctcactgccacagcctcgacctcctgggctcaggtgatcctcccacctcagcttttcaagtcgttgggactacaggtacgcaccaccacgcctagctaatttttgtattttttgtagggatggggttttactatgttgcccaggctggtctcaaactcctggactcaagtgatctgcatgccttggcctcccccaaaagtgctgagattacaggcatgagccactgagcacagcctatgtgcgggttattttctccatgtttttatttgccatatcaatttcatttggctcttgtgttctagatacttaagactcacattagcatttgctatgtatgcttacccagtttctctttggaatgattagctggtatagcaacatataaaatttagtttcctggctgggcatggtggctcacacctgtaattccagcactttgggaggctgaggcgggcggatcacttgaggccaggagttcgagaccagcctggccaacatggtgaaaccctgtctctactaaaaatacaaaaattagccgggtgtggtggcgggcacttgtaatccctgctactagggaggctgaggcaggagaatcgcttgaacccaggaggcggaggttgcagtgagctgagatcacgcccttgcactcctgcctgggcgacagagtgagattccatctcaaaaaaaaaaaaaaaaaaaaaaaaaaaaaaaaaaattagtttccttaaactctctctccatatctccctcaaaaaaccacctattccagcttagtctttgaaaagttcagccagaaccatcctaccagatatcttccaaaagctgacaaagaattttaaagtcaggagatgacccttacattccaaacagtgactacaaaaaggtctgttcctttctgcaaatatcaaaatcgttaagtcagtacttttttattttcagcttcgaattagtttacaacactctccagttttccaacacatctgaaaaaccccttcacatccaatttcataatgtaaatgaaaatataaaagtcaccatgtctaaaagcacaatttatgccatttaatctttcaggctacgcaaatagtaccttcgactgacaagaaaaaattcagaattaaagttcactctatagttttcacaaaactgaattatcaggctaaatgctagattgcacagtcaatttgattactaattctaaaagaggtggaagtttaaaaggctcaacgtgtatagtcttaataaaataaatacctatttatctggcccaggttatacagtcacggtatgcttttccaaaatgttccatataatagttgcaaatgccttagaattatatcttacccaattcaatgacctgctggtcctagtaacccagcaaactatcatttctgatttgcatataagtttacaaacaccatgaaaggtcaccagagtatactgacaacctaaatattacagctgtaactaggcttcctcaacatgataaagggcacccgcctatgagacccacacctatgtcacacttcactgtgaaggactggatgctttcccctacgatcagtaagacaaggatgtctgctcttggtacttcaacgttgtattggagattctaaccagggcaattaggcaagaaataaagggcatccagactagaaagaagtaaaaacattttcatttgcaaatgcatgatcttgtatatagaaaatcttaaggaacccataaaaactattaaaactaactaatgagttcagcaagatggcaaactacaagatcaatacgtaaaaaactatttctacacgctagcaaagaacaatctgaaaatgaaattgaaaaaagaattcctaactcaaggcaaattaaagacttaaatgtaaggcctcaaactgtaaatatcctagaagaaaacctaggaaatactcttctcaacactgccctaagcaaagaatttatgactaagcctcaaaagcaaatgcaacaaataacttgacaattgggacctagttaaacgaaagagtttctgcacagcagaagaaatctatcaacagagtaaactgacaacctacagaattggagaaaataattgcaaactatgcactcaacaaaggactaatatccagaatctataaggaacttaaatccacacacaaacacacacacaaaatcactgttgaaaagtgggcaaagggtatgaaaagacacttctcaaaagacaacaatcaagtagtcaacataggaaaaaatgctcaacatcactagtagagagatgcaaatcaaaaccacaatgagatgtcatctcacaccagtcagagtgactattattgctgggcacggtggctcacgcttgtaatcccagcactttgggaagctgaggtgggaggatcactggagcccaggaattcaactactagccagggcaacatagtaagacctcatctctacgaaaaaatttaaaaatgagcctgtcatagtggtgtgtgcctacagtcccagctaacctggaaggctcaggtgggagggtcactagagcctggaaagccatggctcaatgagctataatcatgccactgtgttccagcctgggcaacagactgagatcctgcctcaaaaaaaaagaaaaaaaaaaaaaaaaaggtggtggggctggggggaacacttatacactgctggcaagaatgtaaactagttcagcccccgtggaaagctgtttggagatttctcaagaaactaaaaacagaatgaccattcaacccagcgatcccattactgggtatatatcccaagaaaaagaaattgtggccgggcgtggtggctcacacctgtaatctcagcactttcggaggccaaggtgggtgaatcacttgagcccaggaattcgagaccagcctgggcaacatggtgagaccttatctgtacgaaaaatacaaaaattagttgggcgtggtgggcatctgtagttccagctacaaggaggctgaggtgggaggatggcctgaactcacaaggaggctgaagtgggaggatggcttgagcttgggaggtggaggttgcactgagccaaaatcgcaccactgcactccagcctgggcgacagagtgagaccctatctcaaaaataaatgtggtatatatacaccatgtgatactacgcagccatgcaaaagaatgaaatcatgtcttttccagcaaaatggatgcagccagagactattatcctaagtgagttaacccagaaaaccaaatactgtctgttctcacttgtaagtaggagctaaacactgagtacacatagccattaagatgggaacaataaacactgggcactccaaaaagtgggagggaaagaggggcgagggctgaaaaactatctgtgaagtactatactcatcatctatactcatcatctggatgacaggatcagcagaagcccaaacctcagcatcacacattaaatccacataacaaacctgcacatgtaccttgaatctaaaaattttaattaaaaataaatatcactaggccgggcgcggtggctcacgcctgtaatcccagtactttgggaggccaaggcgggtggatcacgaggtcaggagatcgagaccatcctggctaacatggtgaaaccctgtctctactaaaaatacaaaaacattagctgggcatggtggcaggcgcctctggtcccagctactggggaggctgaggcaggagaatggcgtgaacccgagaggcggagcttgcagtgagcagagatcgtgccactgcactccagcctgtcatagcggtgaaagagcgagactccgtctcaaaaataaataaataaataaatatcaccaataggccaatttcaagttacaaaaaattattccaattacaaatattccccccgccaaaaatgcaataacaaaagaagcacaagacttgaacactgacaaccagtgttgaaagaaatgacagaccttaaaaaaaaaaaacaaaaaaaaaacagacatccctatgctcatggatccaaagacttgatattacgaccatatttcccaaactcatctatagatacaacacaattcttactgaaaataccagcttgctttctgcagaaattgacaagcaactcttaaaaatttatatgtaaatgtaaggaacccagaatgcccaaaattatcttgaacaaagttacactcccaagttcccaatttcaaaaaatacaaaacgacagctagctatcaagacagtatggtactgacctaaagacagagatcaatggagtaagaatagagtctagaaatacattcttgcatttgtaaattaatttttcacaaaggttgcaggacaaattagtgaagaaatcttttcaacaaatggtgctgagacaactaaatatccacatgcaaaagaaagcagctggatctcctacctcacaccatagtttttgctgttgttgctgtttttaaagaggcaaggtcttgctttgttgcctagggtggaggacagtggcaggatcatagtagctcactgcagcctccactcttgggctcaagtcatcttcgtacctctgcctcctgagtagtgagactacaggcctgtaccaccttgcctggctaatttaaaagtgtttttttcctaggctgggcatggtggctcttgcctataatcgcagcactttgagaggctgaggcaggcggatcatttgaagtcaggagttcaagaccagcctggccaaaacggtgaaaccccgtttctactaaaaatacaaaaattagctgagtgtggtggtgtgcacctgtaatcccagctactcgggagactgaggcgggagaatcgcttgaacccaggaggcggaggttgcactgagccgagatcatgccactcgctgcactccagcctggacaacagagcaagactccgtctcaaaaagaaaaaaaaaagtggtttttcctgcctcagcctcccaaagtgctgggatcatataggtatgagccacgacgcctggatcatatatactggctaatatataaagtctttgtgaccttcaattggcaacagtttcttagacatcacaccaaaagcacaagcaacaacaatgtataagtggactttatcatattaaaaacttgtatgttacaaagtatgccatcaagaaagtgaaaaaaaggaatccctatagaatggggaaaaaattttgctaatcacacctcataaggcaggatatgtaaagaattcttatacctcaacattaaaaagacaaataacctaatttaaacaggcatttctccaaagaaaacacaccgatggacaatagccacatgaaaagatgcccaacatcattaagaaattagggaaacggacgtcaaaaccacaatgatactcacttcctgggtaaaactttaaaacgatagacaatgacatgtcttgacaaggatgtagagaaactggaacttgtatacattgttggtgggaatgtagaacaatatcaccaccattctgaaagacagtttggtagctgctcaaaatgttaagtatagagtcactataggccccataattccatgcttaggtacatacctaacagagagaaaatgttatgttcacacaaaaattagtacaagcatgtatgtacaagttatagcactattcattactcataatagaccaaaactggaaacaacccaaatgtccatcaactaataaacattattcagcagtaaggaatgaaatacatgctatattcatgaacgaaatgtaacactatgctaagagaaagccagtcaccaagattgactccatttatatgcaatatccagaaaaacagacagtaatccacaaaacagataataaactgtggttgtcaggaactggtgggaggaaaacagggcaacaactgctaatgggtatgggtttttctgagggtgatgaaaatgttctggaattaagataataatgaggatcacacagaccttgaatatactaataatctggcattcaataattgtattgaaggccaggtgcagtggctcacgcctgtaatcccagcactttgggaggctgaggcaggtggatcgcttgaggccagaaattcaagacttgccgggccaacatggccaaactctgcctctactaaaaatacaaaaatattagccaggcgtggctgggcgcggtggctcatgcctgtaatcaatcccagcactttgggaggccgaggaggatggatcacgaggtcaggggcttgagaccatcctggccaacacggtgaaaccccgtctctactaaaaaatacaaaaattagctgggcgtggtggtacgtgcctataatctcagctactcgggaggctgaggcaggagaatcgcttgaaccagggagtcggaggttgcagtgagccaagatcatgccactgcactccagcctggcaacagagcgagactcgtctcaaaacaaacaaacaaacaaacaaacaaaaaagcaagcaagccaggcataatggcccaagcctgtaatcccagctactcgggagactgaagcaggagaatcacttgaaactgggaggtacacaggttgcagtgagccgagatcacaccactgcactagagcctgggtgacagaacaagactctgtctgtataatattataataataattgtattgaacacacacatacacttcaactgtttgttctgcacagcaactatgtttacattagctgagcctatcatatacttctgatttcaaatttcattcatagagaacttacgataacgttacaacagtcaatatgacagttctgtccttaaggtgctcactgcctagtagtatgacaacagtatttaataaaatgcccacatacattctaaacctagatgtctgttctgcattactcagttaaaaaggtcacaatttaagacgaaagcaagcagcacttaagagcccaatgtctcacacagctgggcttaactaaaataataataggccaggcacggtggctcacgcctgtaatcccagcactttgggaggccgaggtgagtgggtcacgaggccaggagtttgagaccagcctggccaatatggcaaaaccccatctctactacaactacaaaaatcagctgggtgtggtggtgcatgctggtgagcccagctaattgggaggctgaggcacaagaatcacttgaacaggcaggcagaggttgcagtgaaccgagatcacgctactgcattccagcctgcacagcagagtgagaccctgtctcaaaatagtaataataataataataataataatagtaataaaaataaaaattaaagaaaaacagagcccaacgtcaaagcaatatatacgctttttagcaattaccatactgtgggggaagagctggggaaaaaaagtggtaaataactaccagaatcagcactatctatgaaggattcagaaacaggtgaaaggaaaatggatttaaatttgtactccactttatagtagtagtatattcacctaagggatttaaactcaggttttttttgaatattaaattcattgtcttttgaatattcaaataaagggaatggttgccaggggccagggaagaggggaactggaagtcagtgtttaaggtgtacatttcagttagggaagataaaagttctggatggtgacagtcccaaaacaatgtgaatgtacttaatgccacagaactgcacgcttaaaaatggttaaaatgggtaagtttataatatgtatactttaccacaatataaataaggaaaatcccattagactgaaaatcttaagtcacatacactatagatcaaacattatttgtcctttctaaactatcaaatgcaacaacaaaactatattacaatatagaaaatgaaatttcagtgtgagaaagcgagataggtcagggtaataatcaaagcttcaccaccataagatcagtgcattgagcaaattaataaactctataaaatttgcctaaccttccaaaaaaaggtgactttggtggtactgaaaactgaaaaaaaggcctggatgtctgcaacatgaaggagcagcacaagatgaaatcatagaagaaagcaggaggtacatacacacaatgcaagtttatcaggtcagagaattttgtattttaagtgcaatggggaagtcccttaagggttttttagcagatgaataaataacacaacctttaagaaaccactctggcacttgtgtggagaatggactggaggaagacaacaaaggaagccagagcctagttaggagatgatgacagctgcggtgtgagatgatggctagactagtgtgctgaccaaggaaacggagttcacgaacttgggtgtgttctggagacagaatcagtggccttacggacaaatcagaggataagaggggggaaaaaatcaagatgacttccaagtttctcacagttaattaggttagagtgtcttacaaaagacgggaaggactggcaagaatcaggattcaaagatacagagaaaccagaatcaccaactgaagagaagctggcttttgtctctttcttcaaaaaggatggtgctttgaggtatcacagttgtagtttcctctgaagctgtctaccattgccatctactgatgcaaactaaggataaaggctttgggggtaatttctctaaggcttcaagtagactcaacacactaaaacagcccaacaaggcagagcacagtggctcacacctgtaaatcccagaactttgggaggccaaggcaagaggatcacttgaggccaggagtttgagaccagcctaggcaacatagctagactctgtctctatttttttaaaaaaattaaacaagaagaagctggagaaactgtaagcataaaatcaaacagaatctcatacacatatttaggtgatgtcatctacaacctcacccaccacatatatttgtggaaaaacaatctcctttccaatgtttccttctgtaggtagtagagtaccatcatcacacccagtcacgtaaactagaaatcttgccagtatctttgatttacacactctcctatctattatcaaaatctgttgctttgagccaggtacagtggctcacacctgtaattacaacactttggaaggccaaggcaggaggaggaggatcgcttgagcccagaagttcaagaccagcctggacaacaaagcaagaccccatctttactttaaaaaaaaaaaaaaaaaaaggccgggcatggtggctcacacctgtaagtaatcccagcactttgggaggctgaggcgggaggatcacgaggtcatcctggctaacacagtgaaaccctgtctctactaaaaatacaaaaaattagctgggagtgttggtgggcacctgcagtcacagctactggggaggctgaggcaggagaatggcgtaaacctgggaggcgaagcttgcagtgggccgcaatcgtgccactgcactccagcctgggcgacagttcaagattccgtctttaaaaaaaaaaaaaaaaaaaagctgggcatggtgtcatgtgcctgtattaccagctactcaggaggctgaggcaggaggacccccttgaagccaaggagttcgaggtcgcagtgatcacactactccactgtagcctggacaagagagcaagcccctgtctccaagttaaaaaaaaaaaaaaaaaaaagagagagcgagaaagaaggaaaagagggaggacagaaggaggggaggggaggggaggggaggggagggaaagggggaggaaggaaggaaggacagacggacggacagactgacggaaggagctgctttaggccgtgcgtggtggctcactcctgtaatcccagcactttgggaggctgaggcgggcggaccacctgaggtcgggagttcgagatcagcctgaccaacatggagaaaccccacatctactaaaaatacaaaattagctgggcatgatggcgcatgcctgtaatcccagctacttgggaggctgaggcaggactgcctgagcccaggagtttgagagacaagcctgagcaacatggcaagacccatctctacaaaaaaaatacaaaacttagccaggtacatggtggctcatgcctgtgatcccagtttttcaggagactgaggtgggagaatcacttgagcccaggaggtcaatgctgcagtgagccgtgatggtgccattgcactccagcctgggcaacaagagcgaaactccatctcaaaacaaaacaaaacaaatctgctgttttgtaactaagtcagaggctcactctttgaactactcacgatcagaactctgtacccaatggagattcagagttaatattctaggttgagacctgccaaaaacttttttaaaaagagtgcccccagatgattgtgatgtgcactcctgcttaagagccactattcatgaactcaaaaatctttccttcattattcttaatgttactgtcctcattatctcttgcctagactactaaaatagcctccctatatcttcagccttccccattctgacctattttcttcatcaccatcagaattccctaattcaaatattttttgctattaaaaaaaatgtgggccaggcgcagtgggctcacgtctgtaatcccagcattttgggaggctgaggcaggactgcctgagcccaggagtttgagagaccagcctgggcaacagggcaagacccatctctacaaaaaaatacaaaacttagctaggagcttggttgctcatgcctgtgatcccagttattcaggaggctgaggtgggagaatcacttgagcccaggaggtcaacgctgcagtgagccgtgatggtgccactgcactccagcctgggtgacagattgagaccctgtcttcccctcatcaaaaaaagtgataactggtaaattctgaataagatcttacatactattgcatcaatttcctaattctgataatcatactgaggttatataagagaacatccttgatactataaaacaaatgttatttaggagttaaaggggcatcatgcctgcaatatacccttcaacagttcatacaaaaatgtgtgtatacagagtgaaaaaataatacatctgtgatagtataacatttgtgtcaaaacagaaaatttgtttttttgagatggagtctggggctctgtcgcccaggctgcagtgaaatggcacgacctcggctcactgcaacctctgcctcctgggtttaagagattctcctgcctcagcctcccgaggagctcggactacaggtgggagccaccatgcccagctgatttctgtattttcagtagagacagggtttcaccattttggccaggatagtttcgatctcttgacctcatgatctgcccacctcagcctcccaaagtgctgggattacaggcatgagccaccacgcctggccaaaacaggaagttttaaaaaatccaatagccaagacatttcattctgagttgtactcttcttaacactatacttaaggaagctgttaaatcatttacacacaccatttacacacaaacactacacagtcccaaataattggcttactggcatatatgtaacactatcctttttttctggaggaacaacaaaaatttctggatgagagaataggacaaggcaatttcctttcagaggccaaagttgtagagcatgggttaaggaatgcagctctttcaattcattaaaatgagtaagacaataaagacaaagcacacccttcccaagtcaatataaaagcatattactatgagataattcacaaatagcaacaaagtaaatagtatacttaactcagaagggtatgaaaagccagataatctgaataacagtatgcaatgactctctaagtgaaatagccaaaacaaacaacccacctagactatcctggttggtcccaggggtgttgtgattttggactgtcagaaatatggctgctgggcacacctgtaatcccagcactttgggacgctaaggcaggatcacttgagctcaggagtttgagactagcctgagcaacatggcaaaactccctctctacaaaaaatataaaaattaggcgagtgtagtggcatgcatctgtggtaccagctatttggggggcaaagtgggaggatcgcttgagcttgggaggtggaggttgcagtgagctgagatcatgccactgcactccagcccgggtaacagagtgagactcccatctcaaaaaacaaaacaaaacaaaacaaaaaaacagcactaatctacagcagtgaggatactgacccttggaggtctgtggagcattctggactcacagtggattcatggactctttgaagctatctctggaattcaggcagagactcctggctcagtgtaacacataagtatttttaagcatactgttttttttttttttttttgagatgaagtctcactctgtcatcaagatggagtgcagtggtgcgatctcagctcactgcaacctccgcctcccaggttcaagcgattcttcctgctgcagcctcacaagtggctgggactacaggcacacaccatcatgcccggctaatttttgcatttttagtagagatgaggtttcatgttggccagggtggtctcaatctcttgacctcgtgatctgcctgcctcggcatcccaaagtgctgggattacaggcgtgagctaccaagcctggccaagcatagctttcagagtcaagaaattacccttgaccatgaactttggtgccaagaaacaaaacaggaaaaactgtgtcgtcattagccagtattctaacaaattgttcactataactaactgtcaaatcaacattaggttttacctctctagcacttgtgttctacaatgtatttaaacaagtagaattcaaaataccttgtttaaaaacaaaaaccaaaagccttatcaatgacaggaagggaggtgctaaaacatttcaaaataattttagagaatgtaggatttgtatgaatggcaataaaatgtgttaattgatacatgaaaacaattattttaaatataattatgagccttgagaaaaggactacattcagaaatactatctagaataaaagaaaaatgacaaactcaactcaccagcaatttctacaatatcaccaggaactatgtctttagctttaatccgctgcacactctttctgtcctgtcgatacactttgcccatttcaggctcatattccttaagggcttcgatggcattttcagcatttctttcctgtataaaagaaaacagaagagtagtaaagacctgcctgacactgcaattatttctaacccaaggaataaaatgttagaggtctaatctttaaaaagaaaggaagcccaccagtaacatttgtactaaacaattcacatctaaggcaacagacacaaggacatttattaatttgtattaaaaacgaaacgttaagtaccctcaattaagctaaggggataaaacaatgaggaaaagcaattacagactctgctgtccctaagactgtaaaacacagctttcacctttagccaaatccccctgccatttaaaatcaattctgtctcatgagaggcagtacagcttaatagtctgggctcaggaggctgaggcagaagaatcgcttgaacccgagaggcggaggctgcagtgagacgagatcctgccactgcactccagcctgggcaacagaaagagactatgtcaaaaaaacaaaacaaaacaaaacaaaaaaaaccccaacccaacccaactctgggctaagctgcccaggttcaatacaggctcttaacagctatgtcactgtagagaggttacacaacacacaagtttactgtctataaaatgacaacactaacagttcctacctcaaggtttgtgaggataagaagtcatatgtaacatgcttagattgtgtttgggcacacagtaaatgctatgagtgatgagtatctctcacaaattctaagaactatccctccagttgtaaagaccaatgaatggctggactctcatcatagcactgccagtcccaagctatatatttctcatgacatcatatatgaactatcaaccgttagaagtcacagtaattttcttcccgatttcagaatggaagttgtagaatcaaaccagcctaaagagaatcaaatgacacaaagatgaaagctggtaacacgtgtacctcagttttgatgtatataccccagaaaaagtataaaaaaaccttaattgggaaattcatgataaagttaatttcaatctcatatcagacattcttacccttcaagatcatgttgggtggaatttaactggactgctcaaggttaaacaaatatcccatgagcactgtattttgcatgtgcttaaattatcagctgagcacagtagctcatgcctgtaatcccagcacttttgggaggctgaggtaagaggactgcttgagcccaagagttccagaccaacctgggctgaacataacgagacagtgtctctacgaaaaatgcaaaaattatcctgacatggtgccatacacctgcagtctcagctgctcaggaggctgaggtgggaggatcactaagcctgcgaggcagagattggagtgagctgtgattatgacactgcactccagcctgggcaagagtgaagctgtcttgggggaaaaaaaagataaattatctctgaccctgagaacaaagatgacaattacaatcaatgaaaaggctgggcatggtggctcacacctgtaatcccggcactttgggaggctgaggtgggcggatcgcctgaggttgggagtgcgagaccagcctggccaacatggtgaaactgtctctactaaaaatacaaaaaattaaccaggcgtggtggtgcacgcctgtaatcccagctacttgggagactgaggtgggagaatctcttgagtccgggaggtggaggctgcagtgggccaagatcgtgccactgcactccagcctggttgacagagcgagactccgtcttaaaaaaaataaagccctccttgatgacactggtcagaaataaaagactatgcccctcatactaccttatactgtcattataattttccttactttcagaaggccacaaccctctattgctgctcataccattcagtatactaaagacttaagaatgttctttttttaaaaactcgaatcttttttttctgagacgaagtctagctctgtcgcccaggctcgagtgcagtggcatcatctcggctcactgcaaactccgccccctaggttcaagccctgcctcagcctcccaagtagctgggggcgcatgctaccatacccagctaactttctgtatttttagtagcgacggggacttgccatgttggccaggctggtctcgacctcctgaccttaactgatccacccgcctcagcttcccaaactgctgatactacaggcatgagctaccatgccctgaccaaatataatttttttgagaaaaacataagaagaaggccaggcacagtggctcacacttgtaatcccggcactttgggaggccgaggcaggcggatcacaaggtcaggagatcgagaccatcctggctaacacggtgaaaccccgtctctattaaaagtacaaaaaattagctgggcgtggtggtgggcacctgtaatcccagctattcgggaggctgagacaggagaatggcgtgagcccgggaggcggagcttgcagtgagccaagatcatgccactgcactccagcctgggtgacagagtgagactctgtctcaaaaaaacaaaaaaaacaacagccaggcatggtgacagtcacctataatcccagctactcgggaagctgaggcaggagaattgttcaaacccacaagacggaggttgcagtgagccaaaatcacaccactgcactccagcctgggcaacagagcaagactccatctaaaaaaaaaaaaaaaaaaaaaaaaatatatacacacacacacacacacacacacacacacacacacacatatatatggcacaattacaaatctctaagtaggccatctttctatgaacctaccacataaagatcgttaacatttattggtaaagattagaagtttacaatttcaacaggactaagtatgtttataagatgtgtcgggcgtggtggctcacgcatgtaatcctagcactttgggaggccaaggcagggggaatcatctgaggtcaggagtttgagaccagcctgaccaacaaaatgaaaccccatctctattaaaagtaagtaagttagctgggcatggtggcacgtgcctgtaatcccagctacccgggagggtgagacaggagaattgcttgatcccgggaagtggaggttgcagtgagccaagactgcaccattgcactccagcctgggcaacaagagtgaaagtcggtcaaaacaaacaaacaaacaaacaaacaaaaaaaaaaaaaaaaaaaaaggccgggagtggtggctcacacctgtaatcccagcactttgggaggccgaggtgggtggatcacgaggtcaggggtttgagaccagcctgatggtgaaaccccgtctctactaaaaatacaaaaattagctgggtgtggtgtcaggtgcctgtaatcccagctactcaaggaggctgaggcagaactgcttgaacctgggaggcggaggttgcagtgagccgagatcgtgccactgcactcctgcctgggcgacagagagtcggtctcaaaacaaaaacaaaaaaaaggtctacttcagtcctcaaaggggtgattatatccgtcaaatacctaaaagatcaacacttaacatgaattttaagtctcagagtctgtagtaagcactgaaggggaaacaatttttatagctaaacctaccaaaaaaacccaaggagaataaaaatgacatgtagcttttaaagtttgtcacaggaagcaactaggagacataaagataatggttctcacattctcatttccttaagcagcttctctcacccattttaattccttgctaccgtaaagaatgaacaatgtttttctgagacagtgttgctcctttgcccagactggagtgcagtgttacgatcatggctcactacagtcttgacctcctgggttcaagcaaccctcccacctcagcctcctgagtagctgagactacaggctggtgccaccacacttggcgaagaatgagcaatcttaactgcaaagtttatatgcattaaggtcaaaaatttgcaattaattaaattaataggccgggcatggtggctcacgtctgtaatcccagcactttgggaggctgaggagggcggatcacttgaggtcaggagctcaagaccagcctggccaacatggtgaaaccctgtctcttaccaaaaaatacaaaaatgagctgggcgtggtggtgcgtgcctgtagtcccagctacttgggaggctgaggcacgagaaccacttgaacctgggaggaagaggttgcagtgagccgagacaacaccattgcactccagcctgggcaacagagtgagactgtgtcagaaaacaattaatttatggaataaagggaaaatacatgtaaacttcccgcaaacatatttttactcaacacatcaggaaaaacagataacagaaagattaatacagccctaatcacttacataacttattgaaattttgcagtacaggaatttttgcttacctgccatacacccacaattgcattggctactaatatgagtaaaattacaaaaggttctacaaaggctgtaattgtttcttcaccttcttcaaaccaagccaaaacctagaagagaaatggcacgttagaatgtgtctttttaggcttaatgtcacttttttaaaaagtggctagcactggccgagcatggtggctcaggcctgtaatcccagcactttgggaggccaaggcaggcgatcacctgaggtcaagagttccagaccaacctgcccaacatggcgaaaccccatctctactaaaaatacaaaaaattagctggacatggtggtaggtgcctgtaatcccagctactcaggaggctgaggcaagagaatcacttgaacctggggaggcaaaggttgcagtgagccgtgagtgtactgcatgccattgcactccagcctgggcagcaagagcgaaaactcaaaaaaaaaaaaaaaaaaaagtggctagcactaaagggattatgatagacaaaatctattttctttctctagaaataaacggtagaaaatgcaattatataaacaactggctatgtcttgttcataagaattcttgaaagtcaaaactatacttcagctgggcacagtggctcacacctgtaatcccaacactttgggaggctgaggcgggcagatcacctgaggtcaggagttccagaccagcctggccgacatggcgaaaccccgtctctactaaaaatacaaaaaaattacctgggcatggtgatgtgtgtcagtaatcccacctactggggaggctgaggcaagagaatcacttgtacctaggaggcggaggtggcagtgagccgagatcgtgccactgcactccagcctgggcaacagagcaagactcggtctcaaaacaaaaaaaaaagccgggtgcgatggctcacgcctgtaattccagcactttgggaggccaaggcggggggatcacctgaggtctggagctcgagaccagcctgaccaacacgaagaaaccctatctctactaaaattacaaaattagcagtgtgtggtggtgcatgcctgtaatcccagctactcaggaggctgaggcaggagaatcgcttgaacccgggaggcagaggttgcggtgagccaagatcgcaccattgcactccagcctgggcaacaaaagcaaaactcaaaaaacaaacaaaaaactatacttcatggctgggtgtggtggttcaagtctgtaatcccagcactttgggaggccgagacaggtagatcgcctgaggtcaggaattcgagaccaccctggccaacaaggtgaaaccacctctactagaaacacaaaaaattagccaggtgtggtggcgcacacctgcagtcctagctagttgggaagctgaggcaggagaatcgcttgaacctgggaggcaaaggttgcagtgagctgagatcgcaccactgcacaccagcctgggcgttagagcaagactcagtctcaaaaaaacaactatacttcttaaaaataccttatcttttgatgtaataattccattttagaatccaaataaaatctggggagagggaataaattccattcattttatatgtatctatttagaaaaaataaaacttcaattcttgattaaagtaaaaggtgatcatctaacagtcatgttcatttagttattattcatatcaagtaatatccatgtgacataaatccacagtataaacaacttgatcactgacttaaattttagagcatatataaactgtttaattctaggccgggaacagtggctcatgcctataatcccggcactttgggaggccaaggcaggaggatcatttcatgccaggagcttgagaccagcctgggcaacatagcgagaccctcatctctataaaagaaacaaaaaaccagttaattccccgtttcttttcagtggtactactgaaggctgtttcagaaccgcaaagctgttgggagatccgaagtgtattttgtaggttatcctccatatgacatttatacagcaacacagcacttcagagataacctaagtccaaaaatgtaactggtcacagaacactgccccaagaaaatggggcagaggtttaaacttttagctcatacaactataaacttgttaagatttaaaaactacaaagtaagagtcacactgcacttcccaatccaacaactataaacgtggtaaaaagagagaactcaccacaatgaatactaagaataatgaatatggtaaagagtggtctatgtggttaaaaatttaaaaacctctttttgtggaaacttaccaatccagaaacagtgttaaccacatctaatgatttaatcttggaggtcgaattttttttaattaaaaaattgcttaaaatgtttgcatatttcataataaaatcttctttaaaagatctacttagtaaatcatgaaaacactcctccaaatgatttatggcaataatgaatccaaatgactcattagaagacggcatgaataagaaatatctgtttgagcaggacaaaaagaaaaataaaaacaggaggcaccaggaccaccaagtcctgacagatgccaatcaccaccaacgtccagtgagctagggcaaacagacaaccagaatgagtataataaatgttactgtatgctttcaacagggcattctagtgttaaggccaggaataatgccagaatgaaaacttctctaggaagttataaattttgatagatgcaggatcacagctgctctgatactagactttcaaacatttgccaaggagagcatatcagaaacaagaaactttaattagctcttgggggagaaaaatcgctcaacttgaagagtaactatgacctttccaaaaggtcagtgaggcattagcaactgtaagataagcttcacaccttgttaaagtgggtatgaatttccctcttggcagtaaagcctggggaacaaacttaaagcaacatcccctgatagctagagcaaagggaaagacaatggcaagcagtgatgggaccatcagagcaaacctctactttaaaatactacagcccaaaatgaagaacaaccatatcagatcatgtcgggcagtccttcacagttctgatctattggtaagaaaacctcttgccttgtgtaaggagaaagaggattgacaacagaaaccatgagactgggagggagatggggtaagagaaaggggaggaaaactggatgagtgacattactgaaacgcaagatcccttactgcagtattatagtactatagtaatgtgagttcataattatggtttgccagaagttatacaaagtatacttatacaaggaactgggaaaatgtttctaaaaattttgacaacaggttgaatataaagaattatctgtttcaagccaggagcagtggctcacacctgtaatcacagcactttgggaggctgaggtgggcagatcacctgaggtcaggagttcaagaccagcctgaccaacatggcgaaaacccatctctactaaaatacaaaaaattagccgagtgtggtggtggacgcctgtaatcccagctactggggaagctgagacaggagaatcgcttgaccccgggaggcagaggttacagcgagccgagatcgcgccattgcactccagcctggctgacaagagcaaaactccatctcaaggaaaaaaaaaaaaagaattatctgtttcagctgggtgaggtggctcatgcctataatcctaatgctttgggaaaatctcttaaggccaggaattggagactagcttgagtaacatagtgagaccctatgtgtataaaaaaaaatttttttttaattagttgggcatggcagggcatgcctgtagtcctgactactcgggaagattgcttgaaaccaggagtttgaggttataatgagctatgatcgtgccactactacattccagcctaggtgacagagtgagactctgcctcaaaaaaaaaaaaaaaaaaaaaaaagggcaaagcatgatggctcacacctatagtcccagctacttgggaggctcaagaatcaggcttcagcccaggtgtctgaggctgcagtgagctataatcgcaccactgcatttacccgctgggcgacaggagaccctatctccaggaaaattgaaaattttaaacagtgtgtaaaaggattatctgggctgggtgaggtggctcatgtctgtaatcccagcactttgggaagctgaggcaggcggatcacctaaggccaggagctggagaccagcctggtcaacatggagaaaccccgtctctactaaaaatacaaaaaattacccgggcgtggtggtgcatgcctgtaatcccagctactcgggaggctgaggcaggagaatcacttgaagctgggaggtggaggttgcagtgagccaagatcgcaccactgcactccaatctgggcgacagagcaggactccgtctcaaaaaaaagacagcgaaaaggtaacaagcttcatgaacagcagcaaagaaaagtaaaagagaagaccactgccccatagttttggacataaacagtgtttcttcttccctttgctttgtgctaaatacaataatacctgtcttctgggacatacattatcaaacaagttcaatgcttcaaatgtgccagtattattcaaagtaaccacttgctaatgaacactcaactacattaaactgttaaaaatagagtagggatagagtatctcccaattattatccacaagattaatctctgtacagcactgaaatactgtacaacactctgtactgcattatacttctgataagtatactaaagcaaaaaaaaaatttttttttgagacggagtctcactttgtcactcaggctggagtgcagtggcgcaatctcggctcactgcaacatccgcctcccgggttcaagcgattctcctgcctcagcctcctgagtagctgggattacagggacccaccaccacgcctggctaatttttgtatttttagtacaggtggggtttcaccatgttggccaggctggtctcgaactcctgacctcaaatgatccacccacctcggcctctcaaagtgctgggattacaggcatgagccactcactgcacccggccaaataaagcaaattttaatccaaggtaaaaagcacgttctgctgtaaactgggagacagtcatgatattgtgactcagatatctatacactgtgataataggaagagctcttagtatcataaaaagaaaacgaaagaaaaaagtgcttaaaaagatcataagcacattttgctcctagtattctcagaaacttgcactgtgcctttgggccctcaaacaattgctcaataaatgaagaaatttacatcaagtttttttttttttttaaataaagaggaaatggaaattaaacatttcgagaatgatacagagaattaccaataaacgttacgataatttctgggggaggactttcagtcattaataaaacggaaaaaaaagcatgaattagaactcgttcccttctgatccagatataaagctatgtaaaaacattcaatgctttcaggcatgagaaaacaatctttttaaaaagtactctattaaatccacctttcaagtcattattttaagaaaagctctgaataaactagttaaaccaatcagtaatttgcccttcttatcccatttttaaaatcaaaaattaaaagatacagaagaaaattaaaatcactacaaatccagtatcaaatgctttgagtattctcttctgagaaactacagtaaaaagatctcatgtattttcagaaaattctactgaaacaaactcacccaagtttttgtgacatcaaaagcactaacttaggccaggcgcagtggttcatgcctgtaatcccagcactttgggaggctgaggcaggtgataacctgaggtcaggagttcgagaccagcctggccaacaaaggtaaaccccatctctactaaaaatacaaaaattagccgggcgtggtggtggacatctgtaatcccagctactcaggaggctgaggcaggagaatcacttgaacccaggaggtggaggttgcagtgagccgagattgcaccactgcgctccagcccgggcaacaagagtgagactccatctacatttaaaaaaaaaaaaaaaaaaaagcactaactcaagggggtctagtaggaagaaaagagacacacacatgcaaatggtcaaatgtaacctaaaggttgagaagtaccacagtctagaaagttttattagcattttagggtcaatctaagtagctgacatgggaaacgacggtggaaggtagagaaacctatgcaaattattaccatattaattatgactttatgatttagacagatgggagaccaacatggccctaatgcccacctccttcagatcttttcgcaaatgtcaccttcctcaagaactttccggaccacccaatttgaaaactgttccccctttcacatactctgatatccaaacccccttgctttatttttctcagcagtattatcctccaggtaagggtctctgtctgttttattcactactgtatccccagtgtctgtgacaggtgctcaataaatatcttaacaaagcaggaaaagagaagaaagggcaggcatcagttaagcaaccatacgatgtgttacatttagaacaaagttggtaatcaagaagagaatgaaaagataaagtgaatgatagagggggggtcttcagtgtcaaattaagcaatttctaatgttcatatgcactggaagatgaagcttatttctttcaatccaagtgaccgtttcaaaaaaacactttggccaatattacaaattaaactagatccctacaggtcacaagcatagcttcctattctatgccacagcaaaatattaactatagttaacagtttactacttagtttgatatttgaagtaagtcactaatattctttttaatttaagcatgacttgatgacgcatgatgtatataagaatcgcctagtcacttctccaaaaaaacctgaatattctaccatgttttttctgttacatcaataggaataaactgacacaaaaagagagtcagtgctctttcttttaaaagatacagacaggaggaatgaaacactaaagacaatgcagcagcagtacccaaccccacatgaagaaaatcaacacaacaggtcttatatctgcaattccttgatcaaacaaaccaaagcaaattaattctatagaagtactccctaaacacttattcttttgctatttaccaactcataaaataaaaatgtaacacagttcatttcctgagcagtaactccacagttaccaaaaaggagctcaaatttcaactccaaaatatagctctataatgctccacaaagccaaggtcctatcttataaaaaaaattaaagcatttatttaaaaacctgcttgaaatgcttacaaactataagcctctaattacttcaaagtaaaaaatgaacaaacaaaacccacacacatcattaatttaaaatgctaatataaagtcactcaaactggccactcaaaaaacagacccagtgcaaccccaatagtaacaccagtggcatggtttcccacactgcttcaacttgtaacacagagaattcagtaaaaatgtattttgcttctggcttgtagtcagctgattaatttttaagaagttcccaatgaccttatcggaccccattatttaactgccaacgctattatgtacccagttaaatacaaatcttacactagctccaaatgtatcatttattttgccccatgacaatgtattgataaactatagttaatcgggtctactcatttcccttaattggtaaaacagcagccattttctgggggaaaattttttaatcaatcaagaagaaacattttatcagaggtacattgtgactgactcagaatgctgaatggtttgctatgtaagtccccattttaatcaatgaaaaccacagaaaaggttcttggggactgaattattaatggctacacaatacttggctaatatggcataataaagtatcatagcaggatttatgtaaaaattattccacaaatttatttactgctgccactatctacttaaaagatgggtataaatttaatcttttcctcatctgaactaaataaatgcccactgctttgtttatttcgttctcaaaatagccctctatggtatggttctcacaaagactgaggctgatccctgggacctgcatacatatatgtacaagaactgaaaccgtgaagttttgtcaattttgttttaactagaaagaagtactgcactgggtgaatttcacttatcgtggtttttgtaagaataacgtaattcaagaataaaaggcatctcatgctattagaattaggaacatctgtgtcctattcctgaccatttttaggaaaactagcaagcaatctactgcccaagaaaaaaaatgcaacaaaaaattaataccgaacatttaaaaaaaagttaaaaacctagaaatatacttgccaccccaacaccctttttctgctgtagttctttgcatttcactagtttcttagcaaccatatagcactcaagtgggtaagcacacacagaacaagaaaaaacaccatgctggtttttttcctttaagatctagaaccaactgtactaaaccttgttctttcaacctaagaatcacttaagacaggggtccaatttagataaatataccaccctaaaggtcagtgaccaaatttggtcaacaagggtgccatcacagccgtcatcattcttgtcaccgtcaggaacaactgtcaccttgccattaccaggaagggaaagcaactggaatattccttttgtaagttctatttacagactacaaagagtccaacatcatcttagtatgatcttacaacacgataacaatggaagaacccaaaacattaaaggcttcccagaaaagaactttttgatattaaaagctgataaaccacaagaatttctaagaccatgccacactctgggacaactcctaaccacactgtaaatgtcaggcatctattttctgaataccaatggcttcaagtgttttgttttgtaattttaaaatgcccagattgtttttaaacatagagacacagcttgcaactccaaatatgttttcacccaatggacatcatttgttttctgatttatctatggaatactttcagcttttggggggaaagaaaataaatttttttatacttacaaaagatatacatgctgccagtaataaaatcctaactagcaagtcttcaaactgctcaatcacaagttccagcaaggtttttcctgtaagaaacaaacacatgtgttttaactgtcatcttaccatcagcacaccaacagaggaaaaaaaacagaaacagcatgttaagattaccttcttcagccggtaactctgtagaatgtagaaattcgtcaagcaatgtgtcaagagggaggttaaaaaaaaaaagagagagacattttagcacttcgtttttctaaaaagaactgctacaattctaagcatcaatatctttaaaacacagacctagctataagaatatccgatttttttagcagagggcataccacgaagatatctcaaggaagcatgcactctttgtaatcaatggcctgaggtctagccctaagcgtgaaatcacttcgggctcctgaacctaggagtggtttcagcgatgtcatcacttctgccagatgtgtaactttgggtaggacaagaacggtcagaggccttccaacgacctcgactcctcataaatcggcaggggacgagaaaacgtcttgccgggctcaacctagctgcagaagccacgtccctccctccaccggggccggctgctgctggagagaagcctccgagccttgcgcgccgaaaaggtcgagggcccgagaagcgaagaggtccagggaaggcgaggcgaggaccgcagcccctttctctcccgcggggccggcgcgctggcccgaccctccgcccgcagctgtcggcgggcgcggagccgaagcccacgaggtggagcccggtcagccatcttccctggctctcccggccgcgccgggcccctgcagcggagcgccctgcacctaccgttggagccccatctctccttaagcttcttgacctgttccaggctcagccccgtactctcgttgacgccgaagtggcccagcacctcctccaccgtcttggtgtgcgcgttctccatggcttcgggggcccggccggcctcgcctcccgtccccgcggcctcctcgcctccgcctcgcactccggccgcgggctcgtgccaccccgggagcccaggcgcggacgggctctcccctcctcctcttgcggccgcttccgcctcgccgggcgctgaatcaccccgcgccccctcccccagacaaccgcccctcgcgcggccccgagctccgcagggcgggttgggggctcctgacccaccctccctcccctcgccagaagggagggcctccctcgccctcagccgcccgccgggagggcaggccgcggcccccgagccccctccccgctctcttgaggcgatcagaggccccgcccgggccggaggagggggcgcccggcagaccactgagggcggaacgcggcgagggaggcgagccggcggggcggtgcgcggcgcgctcgcccgggtccctcagcgccgcacgcccgacagcggcggaggaaactgcggcgaaggaaaaggaggtggcgtcggggacggctccgcggcggctgctctaatagcatttatcggccgctgcctcccctttcgccgccgccgcggcatgtggacgccgctcattggccgagagcgcccagcgcggcgcgggcggcgcggccccgccccctcctcccggctccctcctcccgcgcgcctggcgcccacgctgccgcgcaggccccgccccctcccgcgcgccgcccctaggaacccggatcgaggccgcgcgcgccgcggtcgcggggctggcggaggggaagctgggtaccctcttctgtgcctgcggttctctgacccacccacctgcagacgcagggtggggcgctcacagtgggcacgctgctctggggccggtgggcggatggttggaaggcgaggccgaggagctgggagcgcggtccacgcggggcgtctcgaggcgccctcgggctgatgtccttggctcgcctcctcgccctcggtcgcccgggctgcgctctgcatcctaatctggctccttcagagcccccctcagaaaccaaggggaggaattccgcagttcacttcccacacaacccaaatccttcatctgtcgcctcgggaacaccgcatcctacaccccctgccgccagctccttcgcacgccagccccgattcttccccagcgggttctgggccctgacgagggaacccccctcgcgggggggagggagaagagttgattttattattaatagctgacgcagcgcttgataggtgtctgcagggcagtcacagttcacgccgctggagctgccacacagcagctagacttgggctaggaggtgcttcgctgtggctttcagatgaaggccatttcatagactcacttccctcgacaggagaaaaggggacttgaatccaaagctgctcttaaaccacagatgatttgctctgctcgggaggacaaagcgcaggtcacagcaagataaagggaattttgccaatataaagaagctacattacttaacaaggggatgggaaattgcatggaattcatgaacaaaacatgaacatattctcttcacaaagaagagcagctttcttcacggagtaggttgcagaatgaagcaattagtccacttttgtgtttaacaataacgcaccatccgcatgagcaaaagcagagcagaaaaatcacctcagttgtctcaagtggctgggcttcaggacttaagataaattccttcagcagatgcaaattacagtgcatcaccagctgaaaaaatcaggcacgtcatgtcatttaattatttccaaggagtggacgttggcatgtagttttgattgatacttggaaaagaaccaacaaaaccctacacgaaacaaacaaacaaaaaattatactatatggcaacgcactgagagaagccaggtggaaactggttaggtcacaggatcagagccgcttcaagaggggcacgtgagtgcacggtgggagtgtggtcatggagggctggctgttgttgccctctgagaccagctctgcaccatttcgtaccaattcttctcccttacctcctctgtctctttcaggaccgatagaagcactgcaggcaggagaaggatggtttacctttctcagcctggaaattagcttaggcatttgatgttgaatattctgtgccactgtcactgcttggggttgtaagcacctctggtgcaattatgagcttctggaggagttcctgacctcagcctttgtatggaatgctcttcccacagatcttcttcacttgtgtcgttctctttccattcagatcgcagcttacatgtcccctcctcagagatgtctttgctgtctaaagtggctacccagccacagtggctcacgtctgtaatcccagcattttgggaggctgaggcaggaggatcccttgagcccaggagtttgagaccagcctgggcaatatagcgagactccatctctactaaaaaaaaaaaagaaaaaaattagctgggcgtggtggcctgaacctttagtcccagctactcaggaggctaaagagagaggatcgcttgaacccaggaggtcaagactgcagtgatctgtgatcacgccactgcactccagcctgagcaacaacagagtgagaccttgtctcaaaaaaaaaattaaataataaataaattaaaaagtggctactctcggcaattcaccttccatcacatttttcagttttcttttcttcttttttttcctttgagacagagtctctctctgtcacccaggctggaggacagcagcacaatcccagctcaccacaacctcggcctcctgggttcaagcagttcttgtgcctccgcctcccaagtagctgggactacaggtgcacgccaccatgcctgcctcatttttgtatttttagtagagatggggtttcaccatgttggccaggctggcttcgaactgacctcaggtaatctgcctgcctcggcctcccaaagtgctgggattacaggcatgagccaccgtgcccggtcagttttcttcacagtgcttacttgtgatgttgtattttggtttagctgttaactgcttgtctcctagtgtctcatggagctctaggacagaagctccataagaacagggcctgtccatcttgtccatcctcagtacaaagaacagtccctagtctatgctcctcatttattaaatgcctgctgtttgaatgaatgaattagtcccaccatccctagcccataagtgacttgcaaagggcctcccccataggaaggcctcagcaaattttcagtgaactcaagttcattgatttccaatttgtgaaataaactagagggcctctctgaactacctgcctcatgagaatgactgtgaagtgtagtcagtttaaaacaaacagacaaaaacaaagctagacagcattacaggtttctcagaaagaaggaaggttcaagttcacattggtactgttaccacgttgccattgccctcctagactgttctctgcaagctttctatttactggaggctggaatactctcttaagctgaaacagtgtgattttaagcccagaattggcccccttagacatcatcataacaattatgctcttggttcctcaacctgctggtgtctctgaaagctgttgttgatgggttgccaaaatttatcagaaacgcagtctcccaaaggcagaaatatctagtttctctcatgtagaaataaacttgtgcttaatttattttatgcatcgtgttgtacttgcttcttgttaagaagggtttttaaaagtaagaataggttttagaaatactctatttttcagcaaggattgcaggtacattcaatcaattgaggacagggagagaaaacagaaactgtgattcagaaagatggatgatttgattaaagaacttcaaaggcattaataaaggaggacattagctgctaaaaggcaagctggtttaaaaagcaagttagacagaaatggacagtggaaataagtgacttgtaaaagaggccccagccaacttcccaatgctctacagctccttgtaaagcagtggagattgtaaaaggcagtccattctgtatttggacagctctaatcattaaagcagtctcattctaggctggatccacctcccattggctaacttcatctatacattggatcttgtttagctctctggaaccattccaaatgaatttcatccctctttggtgtgagatccctttgagtatttcaagctatctactgtgttaaaaagtctcttctcagccgggcacggcggctcacgcctgtaatcccagcactttgggaggacaaggcgggcagatcacaaggtcaggagttcgagaccagcctggccaacatggtgaaaccccatctctactaaaaaaaaaaaatacaaaaattagccaggcatggtggcatgcacctgtaatcccagctactctggaggctgaggcggaagaattgcttgaacccgggaggcaggggttgcagtgagccgagattgtgccattgcactctggcctgggtgacaaagcaagactccatctagggaaaaaaaaaagtctcttcccggcttcttcctagatcatgagtttgtaatccctcagcaactttgtcatccagtcctagaggtacccagtactgaatacaaaagtctgggcatggggccaggtgaggtggctcacacctataatcccaacactttggggggccaagcgggtggaccacatgaggtcaggagtttgagaccagcctggccaacatggtgaagccccgtctctgctaaaaatacaaaaattagttgggtgtggtggcatgctcctgtaatagcaactgcactccagcctgggcgacagagcaagactccatctcaaaaaaaaaaaaaaaaaaaagtctgggcatggtcttgcagaggagttgtcatgcccacctttgtgctggatcttttccgctgcacactgtagatttgtgctaacagtcaactcaaaagagagtcctttctatataaactacagtcggtatatctcattgtgcacttgcactgttgatagtttttaacccaggcactgaacttctgtgtatacttgaatgttctcatgctctagacccatgtttagggtctgttctagtcttttgagatcttcattttcaaatactttagctatatgtcccagcttcaggttacatacaaatttgataagcatgacttctatgtctctatccagtagaacttctagacactcattccagattgaaaataaccaatcaaatgtatttaattgttcaactattataaaaatcaacttgactacagtgtccaaaatcagtaaagtgaaaatcttataaggcactccctgcctccttatcttctataatactttattacacagtgttgaaacagatcatttttcttttggttgagtgcctgatgtagtcagcttgatctaagggtcatgttatatgaaaacatccatttatgtaccaaaatcagaactggcacagtcagatgctttcactgagacaccaatgagaactaaggccgttcaaccaagtcacatctgtcatctcttattctggggcacatacttgttgagtagaatgatgagaattgcctgcattatttaagttgtcatataaagtcacttaagatgattaggcagacattagtctaccacccgcctttctctactttgtccataagaagttaatgagaggactggccaggcgtggtggcttatgcctgtaatcccagcacattgggaggccacggcgggtggatcacctgaggtcaggagttcaaaaccagcctggccaacatggtgaaaccccatctctactaaaaatacaaaaattaggcaggcatggtggcaggtgcctgtaatcccagctactcaagaggcagaggcagggagaatggcttgaacccaggaggtggaggttgcagtgagccaagattgtgacactgcaccccaacctgggcgacagagtgagactacgtctcaaaaaaaaaaaaaatggctgggcgcagtggttcacgcctgtaatcccagcactgtgggaggccaaggcaggcagagcatgaggtcaagagttcgagaccagcctgaccaacatggtgaaaccccgtctctactaaaaatacaaaaattagccaggcatgatggcgcgcgcctataatcccagctactggggaggctggggcaggagaatcgcttgaatccgggaggcagaggttgcagtgagccgagatcgcaccactgcactccagcctaggtgacagggcgagactccatctcaaaaaaaaagaggaagattcagagacattgtccgtaacaggctccaaatccacactctagtgctcttttcacagaaatgcatccactttggcatggcttgtgttactgaacacacaccagcacctagtgaccaccactttttctacatgcccatgaactataacttcaatatctgagaatttgtcaaacttaacacaatgtcttttccagaatctgccttccctgtacaccgcacgattataagcattctttagacggccgagggttaaaaatccaactcactattttatgcttataaaaaagggacttatagggaatagactccaaatttagaacagcttgatccaggtgctcaaagtcactgagaatctctctccacctcttagctctgcctctttccttttttatttatttatttattttgagtttccctcttgttgcccaagctggagtgcaatggcacgatctcagctcactgcaacctccgcctccggggttcaagtgactctcctgcctcagcattccaagtagctgggattacaggtgtgcaccactacacccagctaattttttttatttttagtagaaatggggtttcaccatgttagccacgctggtcttgaactcctgacttcaagtgatccacccacctcggcctccaaaagtgctgggattacaggcatgagccactgcgcctggcctccttttggtttttgttttgttttgttttgttgttttttttgttttgttttgttttgagacagagtcttgctctgtcgcccaggttggagtgcagtggcgcgatctcggcttatgcaacctccacctcctgggttcaagcgattctcctgcctcagcctcctgagcagctgggattataggtatgcatcaccatgcccagctaatttttgtatttttagtagagacggggtttcaccatgttggccaggctggtgatgaactcctgacctcaggtgactcgcccacctcagcctcccaaagtgctgggattacaggtgtgagccaccgcgcccagcttttcctttgctttttactctcaggcagtctctctccaggtggtggcagacatggttccagcatctccagtttctaattctccagtttagtgcttttggagcactaagctggagagaaaggcctaagattttctctgggatttgtgcacacccctggaagcaaagactatggtcagtgccatctgaactgcacgaactgagagggaaagaagtagttccctacagtggtggttttcacacgcatgcctcagcatcacctggagggcttctgaaaacaccttttgctggggcctacctccagaatgctcaattcagtaggtctggggtggacccaagaatttgcatttctgagttccccggtgatgttgatgctgctagttcaggacacacatgctggaaaacaaagcctcaaaggaaaatcctgctgctgttatcagaagagctgcaaatgttagatctgccaaacaacaaatgttcacttcactgaggaaagtcaaagatctcactggtctggaggaagcagaggtaactaccacagggctgggtgtggtggctcactcctataatcccagcactttgggaggctgaggtgggcagatcatttgaggccaggagttgaaaaccagcttggtcaacatagcaaaaccccatctctactaaaaatacaaaaattagttgagcgtggtggcgtgcgcctataatcacagctgctcggatggctgagtgaggagaattgcttgaacccgggaggcagaggttgcagtgagccgagattacaccactgcactccagcctgggtgacagagcgagacactgcctcaaaaaaaaaaaaaaaaagatgcaactagcacacaatactgaaaaccctgtttggagatgccctacattcttccactgtagtttgcagtgtcgtctgctacacatccaccaagacgtctcctccaattccaagctcctgacacaatgactcattatcccttccttgggacctctcctcaggctgttccttctgcttggatctgcctggtgaacctctatcacccttcaagatgaaggctcaaattccatctcatcttggaagtcttgcatgatagcagccttctccaacacttccatcatcagcgccccagaagtctcaaattgcactttgtttgttttagacaaggtctcactctgtcacccaggctggagtgtagtggcacgatctcggctcactgcaacctccacctcccaagttcaagtgattctcccgcctcagcctcctgagtagctgggattacaggtgtgcactaacatgcctggctagtttttgtatttttagtagagacggggtttcaccatgttggccaggctggtcttgaacttctgacctcaagtgattcgcccacctcagcctcccaaagtgctgggattacaggtctgagccacctgtgcctggcctcaaacagcactttatatcactcgagtatagtaacctgggttttccttccccttctctggttggtcgttttcaacctccttttctgtgcctccccctcttctacttaactttattctttttctttttgagacggggtctcgctcttttgccctagagtacagtggcaccatcatggctcactgcaatctcaacctctcaggatcaagcgatcctcccacctcagcctcccgagtagctgggactacaggcatgtgccaccataccctgctaaattgttttattttttgtagagatggggggtcttgccatgttgcccagactggtcttgaactcctcctgggcttaagcgatcttcccacctcggcctcccaaagtgctgggattatagatgtgagccactgtgtccagactcttctacttaactttaaacctggagtgtcccagggcttaggacccggcagtcttcctatctgtaatctttccttagtcccactgctttaaactccacctacataatgggtttgtttgtttgtttttttgtttgagacagggtctcactctgtcacccaggctggagtgcagtggcgcgatctcggctcactgcaacctcacctcctgtgttcaagctattctcctgcctcagcctcacaagtagctgggattacaggcatgctccaccacgcctgactaaattttgtattttttggtagagacgggatttcactgtgttggccaggctggtcttgaacgcatgacctcaaatgatccacctgcctcggcctcccaaagtgctgtgattacaagcgtgagccaccgtgccggcccacctacatattgttgactacacatttgtatgtccagatgcatatactcagctgctgatctgacatctccacttgactgggtcatggactcgcatttgagagtgacagaaggagggccaggaataatacagagtcctttgaaaatttagagccaagaagagcagcatcttgggcagaaggaatagcaaatgggcaaatgcacatatgagtaatactccttccttcatggcacttaatcaccctaagtcacttgtttattgtctgtcctcttccaccagactataaactccaggagaatggaaattgtcagaggcatgtgaaccagagcaactccatcttgaataggagctgggtaaaatgaggctgagacctactgggctgcattcccagatggctaagacattctaggtcacaggatgagataggagattggcacaagctacaggtcataaagaccttgctgataaaacaggttgcagtaaagaagtggccaaaacccaccaaatctaggatggcgatgagagtgacctctggtcgtcctcgctgctatactcccaccagcgccacgacagtttacaaatgccatgacgtcaggaagttaccccatatggtctaaaaaggagaggcatgaataatccaccccttgtttagcatatcatcaagaaataaccataaaaatgggcaatcagcagccctcagggctgctctgtctatggagcagccattcttttattcctttactttcctaataaagttgctttcactttactctgtggactcgacctgaattctattactcttttggggtctggattgggaccctttcctgtaatagaatcatatgcacttagaaggcatgcaatcaaaacttcttgaataaatgcatgataattatttgcaatgaggaccttgagtccttccttatctattttgtgcccccagcgaccagtgtagtgccaggcacatagcagatgctcagtgaatatctaccaaattaattagtgaagacctttgcttcctttgcaattactgctctgaagaaaaaaaaaaatcttgccatcttaaaaaaaagaaagaaaagaaacccatatagcagtgccaaacaaagtactgtggaatggttctcaaaaccatagctccctgatgggataatgtagtttaaatatagcagctatttttccctctagttggtttgttctttgatttttgtggaaagatttcaaaagttctcctccattgccctccttcctcaccccccaaggtgcttagactttaaatggtgaaatacttaaaatgcagagatggcctggcctcctgagcctggtagaagaaagaagagtgattaaatgcaattttaattttataggatgagttctctgattctcccttccctgccgggtgccagggtgttgctctcacagtagtggtagcagccccaagcaggttgggtttcagtctggcagaaatccaaggacagtgcacacagcagatagggttgctgtggacaaattcctagaataggatctttgttcccaagctgaccagcttgctcccttgatgtcccacaatagaaaaaaaaaggggggggggtgttggtggaggcatgtttaggtctcccattgtgatcctgctgtagttacctgatagttcacaaaagatcccaggaggttggcagccctcccaagttaccttgtgattctctcctgatttcaaatagggggagggaggaggacaccatgtatcctaagagaagcttgtctgacatgcctgatccgttccatctgggaagatgcatcatgaaccccatctggctccagcagtctggctaaggctgaggctgaggcagccgtgggctcccagcacacccccactagctccatccctctcaagcccgcttatccttcatcttcccctgaaagaaacagatcacagcttctgtcatttgcaagacctcccctgactccctatgccctggccttttctgcaatcgcctctgcttcttctccaactgtggcttctctgatctcccagccctctgcagatgccgtgttgattggaggccctctgcagatggcagggcccctgtgaaaatccagttctttcacctgatcctcctgcaccacccagagtatgtcctgatttgggagacagatacacctattataaggtcctgtcccgtgtcttgcaagctggagtctagaggtactggacaatcgttcccgttctgttagctgcttcccatctcaaccagtagagccatggcctctttggccttcaaccttaacatttaaatcttctcacgggggtccaatctgcatggatgggggatgggaggagtctaagaaagcagaggcttggctggagacgtttgcaaacattagacgtttctcttccatgactcatcggaggagagcagtcctccctcttcctggaatgcagcaaacccatggccaactcctacccccaccccatccccaaaataaaacaacccacacctagagctctgtcctcagaaatcagatttccctcaaacatctgacatggcaacttgggggcagggagcattctgagaccacagaacagcctctaagaggattctctgacctgaggggagagagggggctgcagtcatagcacatgtatcattaggatgggtcttttccagaaagcgccttcaccttcctgtcctcccccaaccgttcttcttagtagcctcccagtataaaactaggggtagacaaccgaccattccagcaaggcttgatttcattggtacataaaagggttctagaaaaaaaataggctggtgcagataaaaaggaaggaaggaggcagggtgcggtggattatacctgtaatcccagcactttgggagactgaggcgggcggatcacctgaggtaaagtgcagtttgagaccagcctggtcaacatggtgaaatc

SEQ ID NO: 525 - DNA, 72713 bp, Mus musculus
cactgagatgccaccccgcgaagggaagggactccatggtggctcaccttgtttggggctttgtttgcgttgctgtgcagttgtaatggaaaacgaataaaaataaaaatcccagggccctttttggccagcgcttgggaagttaatcccattgtcctggccaaatgccagctcaggtccacgcagttcgcagtcgttggcctcctgcagatcgctgcgggggtggggggtgggggggaggcgccccgcccccgccccaccccctcactgtgactgcaacagctgtccatgccccacccatgaagaggctgcatttctgcaggactcaaaggggccttctctcccttggctaggtctgggaggagggacaagacctaggtcaggacaagacaagggtcaggaattcaactgctgtttgcagcaggggtgatctgtgtctgaacactttcacacaccacagaatcactggcttctgtcgtgaaaacgactttcaggaatcgctaatgtcttcccagaactcctgcgtagagcccctcccttcgttttaggcagatttaaacgttttttgtatctaaagtacctccgagtttatctccgtggagcttgctgttgtggtgtcctctgattgcttcccctaatgcttaactctctttcctctacgagatttagtatattttatgatatgaagaattgacccgggctggcgagatggttcagcgggtaagagcactgactgctcttccgaaggtcctgagttcaatttccagcacccacatggtggctcacaaccacccgtaatgagatctgacgccctcttctggttcgtctgaagtcagctacagtgtacttatgtataataataaataaatctttgcgtgggagcaaacagggactgacgatcagaggtcctaaaaattcagttcccagcaaccacatggaggctcacaaccatttgtacagctacagtgtattcacatacatataataaataaatcttttaaaaaaattgatccggatctgggcgtggtgacacatgcctttaatcccagcactcgggaggcagaggcaggcagatttctgagttcgaggccagcctggtctacaaagtgagttccaggacagccagggctatacagagaaaccctgtctcgaagaaaaaaaaaaaaaagaaagaaaagaaaaaattgatccgtacaaattccattcaaataagcatcctgagtccccagcaatggaggaagtgaacagagaatattataaagatatttttctccctttaaaaaaaaacacttatttttattttatgtgtatgatttatatgcttgaatgtatgtatgtctgtataccacacactcccttggtgccagcagagaccaggagaggacatgggatctcctggcactgtagtttaagttgggtgtaagtcaccggatagaaccccagtcctccacaagaacagtaaagtgcgcttaaccactgagccatctgtctctccaggaccaaccctcctctctgtttcaagacagggtcttgctttatagcccaggatggctcagaactcaatgggtagcttaggctggcctcagacactacagtcatcctgcctcatcttcttgaatgctatacagaccacacgtgtgtatcatacctagctctggtttgtaagtgtgtgacttcaacaagtgacaacctgagaaccaattatcagaatcttgtgcgtgtgtgtgtgtgtgtggggggggggggttaatagaaatgacagtgacacctgacacctgaacctaaggatggaaggaaataacacgtgactcctgagcgtactgcacaagtggagagtttgccaaggataacatctgccttcccagtttcttttcccttttggtcttaattagcctgattccgtgtgtgtatttgactgttttctagaattatgttatgacccactgaagtccttgctggaatgttccaaaggtttccagctcaggttttctattaagaaagaaggatgagatggggcggggacacagttcagctggtgaaaggcttgcccagcatgcacgagccccttggttcggttcccagctctgtattgtaatcccagcacgcaggagatagatgcaggagagtcagagtttaaaggtcatccccagcctgggatacatgagatcttgtctccaaaaaaaaaaaaaaaagcaaaaataaagaaatatgtaaataaaataaggctagagaagataagggggcaggtattttctggacattcctcatgtgggtgcacgtatgtgaatgtcaggctgtacctccagccccagcttgcctttccttgggtcagagaagcctcttccaggatgttctttggcctcaaaaacgtcccctcccacaagttgccatagctgatctttgcgggtagctgagatttgaagagaaagcttcaagtgaaggctgattactttttggaggtgggggtgggggttggccttgcgtttgctgccttccaggaagaaggagggttctgctctcctctgatgagtcatgggagagagacttccaatctttgcaaacatcccggggccaaccctcgggagagcttgctggggctgtgtgcagcccccaccagggctcccaggacccacctgagaggacctcagggggaaagggtgagaggttctgccttcgcctgtgctggaaagcagccaaggaaatgggaccgttgtatgtctcggggctccagcatgtgaggcacaggagagggcctcctataggggtatctgtctacaaatcaggccccagactgggtcgtacgagaaggtcacgggcaggaagtaggcttttgaggcagctcagttggcgaagtacctatatcataacccaaaatcccaaattaccctacgctttctctagaggcctgcccctctgcagaagggatcctagaccagagaatcccagaccccaaagtggatacccagacccacaggtgaagggtatggtagaaaagaaggcagggcccgggggtgggggtggggggtggaggagtctgcaagggtcttcctgtccaggggagatgaagtagaagaagcaggttagggaagggttgaggctgctggtttgctgggatctgccgtgcctcagctcatgaggtctgcctgagccagatggagcctatgatgcaggcacccagatggaacggctcaggcatgtcagacacacttctctcgggatacacagcgttccccttccttccccctcgccaaaaggaggaatcacaaggtgactcgggccagcggccagacccctgggatttgcggagagctatcgggtgaccagaacggggatcacaatagacacctaaacgtgctcacgactctaccagtcaccctttcagctattgtgggacgtcaagggaaccagctggtcaaccttgggaacaaagatcctgttctaggaaactgtccacggcaaccctatctgtcgcttgctctatctgtccttgggttcctgccagcctgaaactctacctgttcactattgctatccccgctggggagcgggaccttggcaattagcagggcccctggagcctccagcctacctcggagagcctcgccgtcattcaccagcgagagtgtgttccttattttctgttgggctaggagactgaatcctctctgcacttaaagaattgaaacatttaagatctaagcaccttgggatacctgggggggggggggttgtgcaaggaggacagaggaaagaaacttcagaaatgttaacacaaaaatcaaagagcaagccaatggaggcaggaattgttgctatatttaaagtgcgttttgccccgttgggagccacagctttgaaagccatcccataattctttgcttttgcactgctctatggctttctgtctcttttctttttttctttcttcgtgaagatggcaatgctttggtccaccctgcacaccccacacacaccaccaccccccccccagcagcagctgcaaagagggttttattaattaattagttggatatgtgctggtacctgtggcccgctgggcgctgtgctggctgctggggacaccaacaggagagggttaaagggtctcagagacaacagttatcacccgtttaatctggccacttgttattacctgcagacccctggtctcctgggccttataatttgtcgtcagaagagaggtgacagtgggtgggtgacattgccatattattattcacatgtgactatgcctatttattattccttctgccacgaggagactgaacttcttggctctggatattctgtattatttatggctccctcttctaaaggacatgacctctcactcacccttgtcaccctcacacgggggcccgtggcttggatgggtggagacgcaggctggcagctgagcttgtcagtctggacgtggaaatgtgtgtgtcatgtgtccgtgggtggagttaaagcaatgtcgaaagggttgaagatggggaagaatggccagtcctgggccttgattcagagtcaaggagggagagaggcttgaaaatgaggcttagttagtgtgttggcattgagtacctactactatgagggtgaagctctgtgagctgaggctagcccagtctacacagtgagttccaggatagctagggctaccttgggagatcccgtctcaaaaataagtgagtaaataaatagatcactttgctaaactagtgagttacagactaggagtctctagaaaccgcatctgccaccacctgggacagccgggaggtggaggtgactttgcctgggtcagccattgtcagtctggactcccaggaagtctcacgttcataagcatcagctaagagctggggtttccaacactcgtccatgaaaaagacacttagttatacacgggaagaggggcactcggggaggagtgggagtcggcaacggtggtcacaaaggactagtgtgtgatcagtggcacatgtcatatgtggcatgcttgagtgaacgtgtctccacacaaagcctgacagagtggcggtctggagcccgttgtggacaaggactggtgagcacagctctcccgttaaattctcatggacagcggagaatggcagtgcacactgtcaaacctagcactcaggaggcctggggcagaaggacctgggctttgcatccagccagtatctcaatactgtgcccccccacccccaccccagccatcgtatcactcaacaagcacacagcccgagaagcgagaggtggcagatgggatcctgtcagaggtcttggctccttctggcctctcagtgtaagcatttcatgatgccaagtttggtcctggcacttaaatgggcatttctcatagtacatgaccttcaagttacatcaaccaaggaagggcgacagacgatccacaatatctgacagactatcagggaataaagaggcaggaacacccttaaagatccttactttcttgactttggaacttctggtcaagattcattcagttgattagcttttttttttttttaatttaacttttttgtgggggtgggggggttcaagacagagtttctctttgtagccctggctgtcctggaactcactctgtagaccaggctggcctcgaactcagaaatccacctgcctctgcctcccaagtgctgggattaaaggcgtgcgccacgactgtccagctcttaatttaacttttatatgctatggaggtttgaatattggaagtggcactattaggaggtgtggccttgttggagtatgtgtgtcactgtgtaggtggagcttgaaggctcctagtgctcaagctctgcccattttcggaagagaacctcctcctcctcctcctcctcctcctcctcctcctcctcctcctcctcctcctcctcctctttttcctcgtctcttcctggctgcctttggatcaagatgtaaaactctcagctccttctccagcaccatgtctacctgtatggtgccatgcttcccgccatgatgataatagactgaacctctgaaactgtgagccagccccaattaaatattgtcctttataagagttgccttggtcatggtgtctgttcttagttgtgagctgcccacggtactgggggtttgaactcgggatctctggaagagcacttagtattcttagccactgagccatctttccagcccctcgttagttatttttaatctggaatgagtagctaaaaaacctgttggatagtgatatagtcattctgtttgttaaattgtgtgtaaatcaaatctgagatgcatctctagaacactgtttagggttggagaggtcactgaacagttaggagcatgttttgccctctgtgggcactaggcatataatatattatatatatatacacacacacaaatatatatattatacacacacacacacatatatattatacacacacacacatatatatatacatatatataatgtacatatgtagtgtggtgatttgtctaggtatggccccatagactcacttgtttgaatacttggcctgtagggagtggcattatctggaggtgtggccttgctggagtaggtgtggctttgctggaggaagagggggtgggccttgaggtctcttatgctcaagctatacccagtgtgacacacagtcccctttctgttgcttgaggatcaagatacagaactctcagccccttctccagcacatgtctacctgcatgttgccatgcttcccaccatgatgataatctctgaaactgtaagccatccccaagtaaatgttgtcctttctaagagttgctttgagccgagcagtggtggcgcacgcctttaatcccagcacttgggaggcagaggcaggcggattctgagttcgaggccagcctggtctacaaagtgagttccaggacagccagggctacacagaaaaaccctgtctcgaaaaaccaaaaaaaaaaaaaaaaaaaaaaaaacaaaaaaaccaaaaaacaagaaaaaaaaaaaaaaagagttgctttggtcatgttgtctcttcatagcagtaaaaccctaaaaacacatataaaagacaagatactcatacacataaaataaatcttttttttcgtttttccttttattgagaatagatttttttttcatacattatatcctaattatagttttctctcccaccaccccttccagttgcaattctcctgccctccagatccactccctttctgtctcttgttagaaaagaacaggcttctaagaaatagcaaccaaacataagaaaataaaatataacctgaaactatcattttcaaagtggaatgcttcacaaatttgcatatcccccttgcatgggggccatgctaattttctctgtgtccctttggtatatgtgctgccagagtgagcacaagtctaaaaatttttttaaacgagagagagaaacaatgtcttgcagaggactttagttcttcttccagtccccatgttggatgattcacaagctgtaactccagttcagggggatctagcgccctctcctggcctctttaggtacctgcactcatgtgcacatactcccaaacagatacacaacacaaacacagagttaaaactaaataaatcttggggctggaaagatgcttcagtggttaagaacactggctgcttttccaaaggacccaggttctagtctcagcacccgcatggctgctcacaatcatctgtaactccagttctaaaggatctgatgctgccttctggcctccacagtggtacctaggcatatatgtgagcagaacattcattcccattaaaaaaaatctttttaaaaagactgcttgatgataagattataataagcacaaaaaacattcaattatagcagggctcagtgcctgggacagaaaaatcaacaagctaagtataccataaatagctttaacggggctatgattagtacgcaaaggacttgatttgagttcactgctagtactgtgtaaatggaaggacagagtttctctgtgtagccctggctgtcctggaactcactctgtagaccaggctggcctcaaactcagaaatccgcctgcctctgcctcctgagtcctgggattaaaggcatgcgccaccactgcccagcaggctcagacttgtatgctcagtactgggcgtgtccagagaggtcgagggactgagactcgggctataggagaacagctcagtgcccagctgctctttttagtgaagaaaggacacgttagtgggataaagatctggaaatactcaaaaggaatcacacaaagagggatttaagtttgttcaaggtggtttcggagagttaaataagaacggatgtagctaggaaaaggtggacatagcccaaaatggggctgctttaatgattggagctgtccaaatatggagcaggctgcctcttgtggcccccatcacctcccaggaggcctgcagagggctgagacctggccaaggcctcttttgcaagtcacctcctggcttttctatcggaatagctttttaaactaacctgctttttgttagctaatgtcctcttttatccgtgcctctgaaggtctttgatcacacttcatctttctgcattgcatgctgtgtctttcccttctcttcctgtcctcaagtgattaagtatgtggttatgagccttgctggaagacggtaacctttcttattaaagccttgcaaacaaggagcagagtagagcattgcacagaaaacagactgagccccagtttgctttttttttttttttttttaaggcaggttctcactaagctggcctggaattcactatgtagaccaggttagcctaaagctcatcctcacctgcctctgcctcctgagcgatggggttacaggtgtgcatgactacatcatgacgccgtcgtcatcgtcgtcgttgtcttcttcttcttcttcttcttcctcttcctcttcctcttcctcttcctcttcctcttcctcttcttcttcttcttcttcttcttcttctccttctcctcttcctcctcttcctcctccttcttttaaagtgagaccaaccctttgtttctcccaactttatttctacataaaagggaccatggattctgcttctgggagtcttgggttcatgatcagttttgccaacctctaagcaaagaggtgcccagctagaaagcatattaatgtttcagagagcagtccaaccttcagtagaaaatgctttgcagagaacattccagaagggcaatggaatatagtcccaggatctctgagactataggcattgtcttttctgggagggcagttttgccttctttttgttttgtttaagatttatttatttattattatatgtaagtacaccgtagctgtcttcagatgcaccagaagagggtgtcagatctcattacgcgtggttgtgagccaccatgtggttcctgggacttgaactcaggaccttcagaggagcagtcagtgctcttaaccgctgagccatctctccagcccttctttttggtttaaacctaagcttcacagccattcttctcataggtaagtggtccagaggccaaaataaatccagcttattgatgaatggaaaaattagtacactggagctgagcagacgtttgctgaggccttagtgctggcagagcccttcccaagtaactgatgggttgaggagggtggggctctcattggtttcatgcatttaaactgtaggcactcaataaatgatgagcagatgttggggactgtgctttgtactgagtatggaccagacagacaagcttcattctcaagtctggatgcccttacaagatgctaggaggcaggcaccgagcagctaaacaaaatctacagtgtattttccatagaaaagtgctagggcagcagagacccttgaataatgtgatagtaggcatcctggggaggggagctgctttagataataaagcatctttccggggggtgggggggactcggggatttagctcagtggtagagagcttgcctagcaagctcaaggccctgggttcggtcctcagctctggaaaaacaaaacaaaaaaaaccaccaaacatctttcaggaggggaccggacaaggaggaagatggcctgagggaaaaactgggaacccgtgttgtagggtgcacctccagcccctgaaggaggggactacagaacaaaagccaaacccagtgagcatcacagacaaactaagagaggtcatgaccttcctactctcagtgccccttgctgtaggtacgacagaactggaatccagctaggagggagacccaccagctctccatccctcccaccctctcaccccccacctcgcaggcagtcacctgatcctccagaagaggctgtgacctaaccagtttccaccttgcttctagggagtgcattgctatacactagaatttttgtttgtttgtttcgtgtagggttctgttggtcctgttccaagtatcaatcagaactgcgtgccagcctccactccttggaaataattaaatgaagtgacgtacttgattttttttttcagtcgggtaaagcaccatgatttgcatctgctgaaggaatctatcttaagtcttgaggcggagccttgtgggacgtctcaagtgattggggggggggggtggcgttgctaaacactcaagaagatgaaatgctttattttgcaatctatgcccttcatgaagccgcattttgtgaagatatttgcaaattcaatgcaaagggcctcctccctgttaagtatggcttcccacattcctctgctttttaaatttattttgtatgttttagacaaggtccaacgtggaagactgctcctaaactccttcagtgtctgtccatgaccttgaactcttgatcccgtggcttccacttctgttcgtgggatcacaggcgggctccgtatagcctctttatattggcaaaattaccttgcatgctaggctctgtacagacctcacagaaacaacagatgatctgtggtttaagaatagatttgggattgaaggctccttctctcgcattgggggaagtggaagtcttatatagcagccatcatttggaagccaaagccaagccacctagcatagctgctacagcataacctgtgacttctatgcagacgtgtgtcaaaggctgtgtgagctactaaaaacgaaataaaacttcctccttcctcccccaagagtgggattccctgtcggggcacagaacccgcaggggaaggaagggctggtgttggcgtgcgatggagatgaggctttcggctgggggtgtgggatgcggtgttcccgaggcgacagatgagcgcttttggctgtgtgggaagggaactgcggaattcctccccttggttgctgaggggggctctgaaggagacattaggatgcagagcacggctcgcgctgcccaggacgcggaggcaagccaaggacaccagtgcgagcgcgcctcggcccccctgcgttcccgagcctccctgccaatgcgcggtcccagccagtccccaacctcagcggcagggcaaccagcacagagcgcccacccgtgaactccgcgctctatccccgcgcgcggtcgatacgggaaaagccgtggccccggaaaagtcaggctcaccctccgcccgcgccggtggccgcagcgcatcgagcacagcgtggacgcagaggtggccctggccccgtgcgcgcgcacaggcgccgcgcgcggcctcgatccgggttcctggggggcggcgcgcgggaggaggcggggcctgctggcggcgtgggcgcgcggtgcgcgcgcgcgggagggcgccggaggagggggcggggccgcgccgcccgcgccgcgctgggggctctctcggccaatgagcggcgtccacatgccgcggcggcggcgagaggggaggcagcggcggataaatgctattagagcagcctccgcggagccgtccccgacgccgccacctcccgtctcctccgccgcagttccctccgccgccgctgtcgggggtgcagagctgaggggctcgggccggcgcgccgcgcagctcctctcccgtcgcctgcctcgcggttcccggcgccgagggctcggcccggcgccgctcctcatctgcgccccgtctcctcggcgcagcgcccggggcctgcgctgcccgcggccggctggcagctgctgaagcgacccacactcgcggcggggcgggaggctcgcagtccctcgggcgggctcggcgaggccgggccgcgtgcggcggtttctgggggagggggctcgggtgattcagcgccccggtcaggcggaagcggccgccgccgccgcggaggaggaggaggagaagaaaaaggaggggacagctgtccgcgcccgggcgcccgcggtggcacgagcccgcggccggagtgcgaggcggtaggcgaggaggccgcggggacgcgaggcgaggccggccggggcccccgcagccatggagaacgctcacacaaagaccgtggaggaggtgctgggccacttcggggtcaacgagagcacggggctgagcttggagcaggtcaagaagctcaaggagagatggggctccaacggtaggtgcggggcgccggggctgcagcggcgcggcgcgggcccgagcgccaaggaagatggctgacccggctccacctcgtggggcttggctcggcgcggcgcccgacggctgcgagaggccgggcggtccacgcgcgggtctgggccatcgccgacctctaggggtctcgagccggtgaccttcccggccggcgctcagcgagtcggattgggggggggggagagggagtgggaaggagggaggaggttcctgcggctgggctgagtcccccgcggatttatgaggcgtcgatgttgttgagaaaccctcggaccgtttcttgtgctccccaaagttgcacatctggcagaagtgatgacccagctgaaatgactgcatggtcctggaggccggagagggcttacgggcagttccgaggccactgattaccagggctgaataattttctcggggtatcaaagtggagacagattgttgtacgttcatacacctatatccgccattcagacaacgatggtggtgaatttagcagtttttaataaaagcgctaatacaatatcttcatttttctttctgctttcctcctgacacgttgctgtcgaatttcggccttctagaattgccggctgaagaaggtaaataatattaacatgttattttggagagatgatgtgtgcaggctgattgatgtggacaattgaaacaaatggtttgttttttttttttttttttttcctttccttttctaacaggaaaaaccttgctggaacttgtgattgagcagtttgaagacttactagttagaattttactgctggcagcatgtatatctttcgtaagtatttaaaaaattattttgtctccccataaaagttgaaagaatttcgttgggacaccagaaaataaataattaccattgagtttccgtgtttaaaaacaaacaaacaaaataactcaagaattagaggggggaaaatgatagaagctgttttgcttaggttacagtgcagtgagaggtgacccctgactgcgcagggtctctggaattcttgtgtctcaccagtttttagtatcagaaagttcctcactctaagtccttttctgttggggttcttccatttgttatcatgttgtaagatcacactacgatgatgttgggcactctgtaaatagatcgtacaaaaggaatattccagttgctttgccttcctggtggtggcaaggtgacagttgttcctgacagtgacaagaatgatgacggcagtgatggcaccactgttgaccaaatttggtcactgacctctagggtggcatctaacctggacccctgtcttgagtgattcctagagtaagagagcaaagttcagtattcttggttctaaatattaaagagggaataaaggtgaaggtggggtttttgtttgtttttttttctttctttctttcttgttctgtatgtgcttgagccagtgtggttgctaagaaactagagaaatgcagagagagacctgcctaagaaaagctaatggggacggcaagggtagttctaggttattaacattttactccaggatttttttttcctgggcagtggaccttatagtttcttttaaatggtgataatggtatgcagatgttcttaatcttcataacacacgccaatttttattcttagaacattgtattcttatactgtgataggaagtgaaaaatcatacagtacttgtcttaggtttcacaaaactgataactgtatggtttcaattatgtattcacacgtttaagtctgacccaggggttctgtggtcatggcctctatgaaaacattagcttagaggattgtttagagaacttactgaattcaggtaaaggaaagattaattttttagctatttttaaaataatagttaattggcagcaaaggggacttttaggagcagttgtatacatgaattttctcctgaaactttggtttgtcatctacgtgttgtgtaccccttactcgctagctcatttcgtaagaatttcacctgtggttttcactgaataaaatttattagattcccataggagaccattcagcatactgctgagttatttactctgtacttcttatatataatatctttttgtgattaatttttaaaaattttgtccaataggtggttgtttcatttgtaaacaagataaatggagttgattatagtttgagcgtgttgccatgtgctaaaataagttatatatgtgggggttgtttaaggtttgtatttatgcaggctacatcattctggaagtctctgctttcgcattaaatggtgccattcactaaggccatcaaggacttagaattagaaattaactagatgatatatacaagctgtaggcaaaatgcattcttactggtccctttcatattatttgaagcagttttagaaatgtgccaagtgaacatgtgaagtgaacaagtgaaatatgtgccaagttattttctattggatttcagaaggtttcaaattgtttgtggacagtttgactttttatcaagcagaattaatgattatagataaattttactttggagtaattaggaatttattctaattttcaaatttgaagtgcttaacagtttttgtgatagagaagacattgcctgttggtagttgaaatataagttcattttcaataactacttggaattcttgttcaggaaatgaactgctacatttttatgatatgagttgttaaatggaaaagaataagtgtttaggaagtgctttttctagaattcatttcatttgctttggtttatttgatcaagattgtgggtagattaagagactcttgagaggttgctctgaagcctataccacccctgacttctagcgtccatgcttaaatctgtattaaaacctttaaagataaactccaaggttgcttaacttcaaaagaagtagttcaggaaggcgaggcacccgtgcagcctgggctggaataagactgctcttaaaagctacaaagatggaaaagagaaaaattgtgctctaaaagatgggttttcctgatggtcttcatggagggttggtagtgctatatggtacttgtctgttctttccttattttctttttatttctgttactgcctatataatatgtatgtgcaatgtatgggtgtacttgttcaggtatgtggtgtacttgtgtgtgaatgtgtgtgcagaggccagaagttgacatcaggtgccttgcttaataattctcatctaaaatactgaggcagggttgctggattaaacccagagctcgctgattcagctagtttaggtagccagcttgcctctgcctcctgaatgctgcaattacagccagactgccatggcttgctggcctttatgcaagtacctgaggtttaaactcgggggcttaaacatatagtaaatactgcctgcctagccatctttcagtcccttttgttttgttttgattttgtgtttgttttttgagacagggtttctctgtgtagtcttggttgtccttgaactcactctgtagaccagactgacttcctctgcttcccaagtgctgggattaaagacatgcaccaccagcatcttactgtatcttagactagtctcaagctcactatgtacagcccagtcttacttgtttctcttgccttacttagccttttagacgccaggattgcaggcttgtgccacgaacttcagcttatttatttttatagcttccaaataagaacactgacttatttgttgtggtagtcagtgtattcttactggcataacaggaatatcacggttgtatacgcaggttctttgtagaagtgaacaggcagttctcataaatcatcagattctcctcaggttagaaagatattaatgatttatttcaaatatcagattagtaaactgttaactacagttaatgttttgctctggccaaaaaaaaaaaaaaaaaaaaacctgcattaatgttttacactggtggcccatggggacagtttaatttttagtatccaccaaaattgtttcttttaaaaaggtcaattcaaatatggtagtgcatgctataattgtaattagtgtttgatagctaagtaggtgagttaggagttcaaggccatccttgagtatacaatgagtttgaggttagcctgcagtacataagactatctctgcaaaatgcatctccctctgcacgtgggttagtttgacaccattcactgtttttgttttgtttcactgggtttccttctcttagattagtaactttaagtattctgcctaactggaatgcctgctccctcctcctcctcctctcccccagttgaacacctgacacacacactggggatatcagggaacagggtctgttgcctggaatggtacttttgagagagtaaagcgaatgggctgtgatagaggaattggctgtagggaataggagcgtgcaggcttttaatggctggttgtgtaacctcacaagatgacctttgaggaaagatctgaaggagtggtgagaatcagtagggccatgttggcattagctcatcggtctagaaagtagtggggtactgatgatgagagtctgtacaggtttctttacactactcaggttgattttaaaatacttttttgttgtgtttttgagacagggactgtctttgtagttttggctatcctggagaccaggactatatagactatgttggccttgaacgtaagagatcctcttgccactactgggtcgtatgtatcttcagtaccttaaatataggaatgaatttgcttctaggattttgagacattgataaaatatgctatctagttttactttgctggtttcaatgatcttcaggaagcaattgatagtgcatttatggtggttgaaattttttaattttttaaaaatacaatttaaaaggtggtttgaagatgaagcattaatgtttttcctcactttccctactatggggataaccacaatcctgtcatactgtgatgtgtctctctcccatgtctagcagaacacggccctttttgtgttagaacaaaatttgctttattcagtattcctgttagaagtcagtagtgccaggttaagtgtggtgacagacacttgtaataccagtcttgaaaaagctaatgtaggaagattcaagttggaggtcagcctgtccagcaacaacaggctagagagggctggagagacggcttagtggctgcacttgctgtacttgtagaagatgtggatttagttcccagaacctttatcaggcggctcaagccatctgtaacaccaattctggggtggtttgacacctttttggattctgtagacactggcacacgtgatgtgcatatacatattctccggcacacacacaaacttaaaaaaattatgggcattattagtgccatagtgccatttcttgcgtgtttggatagaacccaagacctttacacattttaggaaagtgttctaccactaagttatacactaatgcagagattgccctataaatgaatgtcagtagaaagatctccatcctacactgctcagcttaaaatgggatggcttagagtggagctggcaagtttgaacctttgaattcaggggaaaggcactgttactgtaacaatacagagttgagagagaagagggaaccctgtcttttcctagaactacactttgttcctttccttcagttattggtggagcgttggttgccttctttactcacagactctggcttggggctttttacttagctctgtgagcacttgtttcattgtctcccacttgtcggtattacacactgaggtattacacactgagcatcgtcggttcaccagagcatcttctgagcccctagggatgcagctataaacgaaggcagtataaagagaatccctgatgttcaatgtagtctcaaagaatttttttctagatatatttccccttttgtgtaaatctattttgtttaacttaggaaaacccatagttataactaaactgaccaaaccctaagagagcatctgtgtagttctccttacaccttctcccatcagtcatctgtcaggactgttttcccatctttataacctgataggattttttttatcaatagagcaaaccatgagacaccaaaaaacacaatctgagcatatatttgcttttgtcagtaaaatgtgattgatcttcaatttgagatgtaggatttgagtttctgggctatttattattttacaatagactatctttaagaaccttttacgttatttgcatctctgtgcatgtttgtgtgactatatgtcacatgtgtgtggacctctgggagcaggaagaggactcctggtcccttgaagctggaattacaagctgagctggagccctggaagaacagcaaggggctcttagtcactgagctgtctcttcaacctcagttttgtttttgttttaataaagtattcaagaaactgctgtggaaacccctgtcacctcttgtactggagactgactcagggcctggcatatgttaagcaaggtctctgtctctaggtactgcactatcttagcagctctgaatggatgctccttaaactttaaataggtttgaatgccattcttagagcagatttggccactagtttctcacccagcaataattagtatatctgtagagcctttgagtgtgggtagcctgtgttttctattcaacaggacacatggaaggcaaggttactgtactggttaaattaggattcttgcatttgataactattaggcatgagaacaatgtacatctcttgactgctaaaggtttgtgttcctctagtaattctgacactgctcaccctattccttcactccagctggtaagggacggtggcctaagttgtcctcaggattggctgccaagaaggaaattcatacccactttaacaaggtgtgaagcttatcttagagtcactaatgcctcactgaccttttggaaaaggccctgtcactcatgaagttgagcaatttttcttctttaagagctaattaaatttcttactctgatttgttctccttggcaaatgtttggaagggctgtatcagcagctgtgatcctgcacctatcaaaatttataacttcctaaagaagttttcattttggcggagatcctggccttaatactaggaatgccctgttgaaagcttgcagtcgtgtttattacattcattctggtttcctcttgccctacttgtcaatggtaattgacatgtgtcagagcctgtatactttttctttgataggattctttgctagttcaatgttattcctccttagagttttaattaccttttggtaacttgttatttgtgggttttttgttttgttttttaaaaaaccttagagaataaatgctatgtgggctcattattttacctttattttacttataacatgggatgtgtgtgtgtgtgtttacacacacattttacttataacacggtgtgtgtgtgtgtgtgtgtgtgtgtgtgtgtgtgtgtgtgtgtttacacacacgtttgtttggagacagggtctctttattatgtcctggaactcaccttatagaccaggctggcttcgaactcggatccactggccattgcctcctaagatccaggagtaaatggcttttgggggtggtggggaggggtggtatatacaaaggtcaaataactcaatgggattggttctttcctcccacttttatgtgggttccagggattgaatcaaagcttgccaagcttgtagagtaagtgcctttacctgatcagtcatcttgctagctcctaggtaatcttttaaagaaaaggtcttggttggtgagatggctcagcggttaagagcactgactgctcttccaaaggtcctgagttcaaatccatcccagcaatcacatggtggctcacaaccatttgtaatgagatctgacaccctcttcagatagtagtgtctgaagacagctacagtgtacttacatataataaataaatcttttttaaaaagaaaaggtctttattatgaaaatgttttcattttaagccatatagcctctcgtctcacgtgcccccccccccatgtaaagcaaggtccacctcccagatttagtcattcaggttggcaggtttttgataaaattgccactgacatttatcaggacttggccctggaaagtgggagggagcttatgtgcatatgtgacatgggcattgctgtatggaggtcagaggacaactttgagaagtcggttatcagatccttgcattgtgagtgtgaaacttgaacccagatcatcagacttggatagcaagtgcctttacccactcatccatggcacttgccctcctagttagctttgaattcagatcagcaagtccaacctatgctcatggcacctttgggggcgtttaatgatcctttttcaggggtcattaagatcaccagaaaacacaggtatttacattacaattcataacaaagcaaaattacagtcatgaagtagcaatgacaataatcttatggttggtggtcaccacatgaggaactatattaaagggtcacggcactaggaagattggagttttgtttaaaaaaaaaaagtggtgtgtgtgtagcattcatatacctttttggaatagtttgcctgttaccgtgtgattgaatttctagactgatagtctaggcagcagacacttttacataatatgccgcttccccagcccagtttattttatttatttggagggtaatttatataatttctgaagtgctgtattgcaatactaggtgctgtggtaaattgctttaaaaaatacatttctcgtctcagaacaagcttgtgattctgatgtgaccctcactaaccctgagaaggtagaaattaggttctactttgaatttgaataaatggtcaattttttttctccaaatgtttgcttgtttgggtgttttttgttttgttttgttttgttttttgagatggggtttttcagtttgcagaccaggctggcctctgcctcccaagtgctgggattaaaggtgtgcaccatcacgcctggctacttttttgtttgtcttttaaactgtaaattcatgccatgtatgtctgtgaattgatgtaaatttttaagaatttttttattaattgggtgtttgcctacatgtttatttgtataccacatgtgttcagagctttggaggccagaaggggtctttaagaccatacctactccccctctctaccctctactacctgagttacagacaactgctggggatgaaacctggtcctctggatgagcagccagggttcttaacctgagtcatctctccaggccctggtgtgaacattaactaaatcagtgtgggtataggtgtttacctggtcaccttttactataataaaatcgggaattttaagtttcatttatttgaaatgttacctatgaagtgaatgagattctttctttccaccaaaacaaacaaacgtaaagggaaaaaaaaaaacctaactcttaataagagttgttgagtaatcttaactaaggtaagaaaaggatataaaccaattgcttctgttattatattttgtcttatatttaggatgtaaggacaagggattttttttctataataacttacataatgttttatccttttattatgaaagtagctaagtgtaaaagcacataagcaagtccaacatgtgcaatttttccttttaggttttggcttggttcgaggaaggggaagaaacgattacagcctttgtagagccgtttgtaattctgcttatcttggtagccaatgcaatcgtgggtgtgtggcaggtaagcagaacactcctgcagccgacacagtcttcttttcttttttaaagatttatttcatgtaagtacactgttgctgtctttagacactccagaagagggcgtcagatctcattacggatcgttgtgagccaccatgtggttgctgggaattgaactcaggacctcaggaagagcagtgctcttaaccactgggccatctctccagcccattgtttgtttgtttttgtttttgtttttaagacaaggtctatttacacgaccgtggctgtcctgaaactacatagacaaaggtggtgctgcaggcctttaatcccacccagtacttgagaagcagaggctggtgatctctgagcttgaggccagcctggtctacagaacaacgtctagaacagccagggctacactgtctcaagggggttgggggggataagggaagtaggaagctgaatgagaaagaaaacagaatgaatgtgggtgagaagctgggtatgatagatcgtcccttgcatagcactgacgagtttgaggcaggatctttttagactatactgggcaacaaaaaaagaaagttgataatggaaagcttcagaaaaccaaagaatgtgagaaatataatcaacctttatatttcatgatgattttgaagaaaaacttcatgaaaatgtcttttaatttcctcagattgtggagtacggaggaagctataagaattcttaacccaaattgtttttaattttctccattacacagactttgcctgcacacaggctgaaagcttatttactagagaacagaaattgcatccttcaaaattgatctataggatctacctcaaaaatgtcaatatgttttgccttttgtttagagtttgacaagacacctagactaatatttcaaattcattttcaagttggtttcccgcccccttcaggtttttggtgtccttacttcttactttttttttttggttttttttttttggtttttcgagacagggttcctctgtgtagccctggctgtcctggaactcactctgtagaccaggctggcctcgaactcagaaatccacctgcctctgcctcccaagtgctgggactaaaggcgtgcgccaccactgcccggctggtgtccttacttttaaaactgaagtagaatgcttgacattctttggtcaatttttaaaaaatatttatgtatttttggtaatagcattttagcccaggttaactgcaaactcaagactattcttcgtgagccttccaggtctttgggattacaggggatcgctgggccacacagattactatccagcataccttacaaacaggcctggcctgggtgacctgtctgtaactccagctcttaggaggtgcaggcagaaagagcagtttgttggcctttgctatataatactccccaccccttgtcttcccatgttctaaattttgaagcaggatggtgaccaggcatactttttttttttttttttttggttcttcaatacagggtttctctgtgtagtcttggctgtcctgaaactcactctgtagaccacactgcctcaaattctaatgtgttgtgttttgtttttgaggcagtagctcataatgtagctcagggtggcctccaactcgccattctcctgccttaaatttcacacttcagggattacaggtatgcattgccccatcatatttattttatttttgagacagggttttactaggtaattctggcaggcctggactcacagaggaccgattgcctctgcctcctatactgggttaaatttaaggtatatatcaccttgtttagcctagctttttactgtataaataagtttgtaaatgtttgtattaaaataccaattgttgggctgagagatatctcagtggttaagagcacttgctgctcttctagaggtcctgagttcaattcccagcacccatgtgggtgacttacaaccatctgtaatggaatctggtgacctctcctggtatctgtaaagacagagcattcatatataaaataaacaaataagtaaataaataatttttttttcttcgagacagggtttctctgtgtagccctggctgtcctggaactcactctgtaaaccaggctggtctcaaactcagaaatccacctgcctttgcctcccaagtgctgggattaaaggtgtgcaccaccacgccaggcttaacatgctttttaatattaagattataagttttaatttctaatctagaaatatttaaaccagacagcctagtttaccatacttggcttttctttatacaggaaagaaatgctgaaaatgcaatagaagctcttaaggaatatgagcctgaaatgggcaaagtgtatcgacaggacagaaagagtgtgcaacgaattaaagctaaagacatagttcctggtgatatagtggaaattgctggtgagttgaattcagttttatttattcctagattatgtatttaacgttcttttctcaaggttcagattatatttaactctttgtgtttagatatttttttgtttttcaattttatgcctatgagttatttgcctgctcaggactgtctgtgcactgtgcatatgcctggtgcctgcagaatccaaaagagggcattggattccttggaactggagtaaactgacatgtgagctctgggatttgaactttggtctacctgaagatcagtcagtgctcttatccactgagccatttctctagccctggttttgttttgttttgtttgtttgttttttttaatgtatattttaaaatacacttttcatatatttaaaaataaaattttgtgacaagtgggtctctattttgtcccttctacctttccactctgtattcctccttcccttcctcccccttccgccttttaattttattgcttgttggtttttcctgtgcttggtctgcgtgtttgtgtctgtgtgaagaattggagccactgaaactttagttacagatgtgagctgccatgtaggtgctgggaattgagccctggttttaaaagagcaacaaatgcccttaacgactgagccatctctctagccaccttcattttctttttatatatgtatatatattgttggggtttttttgtttttgttttgctgctgctgtttgtttcatttgtttttagagatagggtgtctcggtagacaggctggccttgaactcagagattcacctgcgtctgcctcctgggtgttgagattaaagtcatttttttttagatttatttatttatttatccattcatttattatatgtaagtacactgtagttgtcttcagacacatgaagaaggcatcagatctccttatggatggttgtgagtcgccatgtggttgctgggatttgaactcgagacctttggaagagcagtcattgctcttaaccgctgagccatctcaccagccccaattaaagtcatttttaaatatttaaaaaataggcaagttaaatactcaaaaaactaagttaactattaaaaaagtaaaaaagatgaactttataatttgaatatagttagtcgtcattccctacattcacaactaagttcgtttgacctatttctgaatccttcatggccagttagccacttctgcacatcggtcgtgggaagcttgggcagagctttggcctagtgcccatgtgctcgcttggattttgatcgttctaagaggtgcagaacagagagaactagattttacatagatatatttttaagcctcttgtactcctttctttctagacatgtcctagtattctgtaatgctgaccaaaacatgaaatctcatctttatcataagatttgctctgcagaacagatagtaaatgagttcaggaataggcacttaagtgagaggatattttacaatcatacaaaattttggttaaaagccaccagctgctctaaatatgtcctattcaacttttctagttgaggaaaattacttgctgtagtttctaaagtatatacatgataaacatgtatatggtatgtacataagtcacatttcaatttgttggtggctcaggtcagtctttttagcatcttagctgacatggttgacatgccatacaaccttctcttccacatacaaagtcctgacctgttcacagagttctgtagccatcgctaattccagacattgatccattcgcagaaagttatcttttctagcaactgttccttgtctttcactgtgccctaacaacagcttgcttgactttccggggtttacttattctaagatgttagacacaataatagtgctttgagagccagatacacgtatgtgtaaaagtaaaaataagtttaaaaaaagaattaaattttaattatgagctaataacttaagagtttgtatggatattacaagtggcttatgtaaacctttgaactatcgagaacacatggagtcataaaactgactaggcaaaaagtaagagaacaactactatcatgtattatttctacattcttttttttttttttttttttggtattttgagacagggtttctctgtgtagccctggctatccaggaactcactctgtagaccaggctgtcctccaactcagaaatgcgcctgtctctgcctccggagtgctgggattaaaggcgtgcaccaccacgcccggctctctacattacttttaataccaggaaattagttctgatgaatggaaacaaaaagtagtaaagctatacttaatcttacattaagggaacatcagtggtattaaattttctgaattaatctgttaattttacaaatgtgaattaagctataatagcaaaatagtctctgaatttaggatttggcagtggctttgatgtatgtcctaggggcttatttattcaaggatttatttattgagccgggtgtggtggcataggcctttaatcccagcactcgggaggcagaggcaggcggatttcttagttcgaggccagcccggtctacagagtgagttccaggacagccagagctacacggagaaaccctgtctcgggggaaaaaaaagatttatttatttattttatgtatatgaatgagtacactgtagctgtacagatggttgtgagccatcttgtggtttctgggaattgaactcagtacctctgcttgctctgacccaaagatttatttattattatatgtaagtacactgctgtcttcagacgcaccagaagagggcgtcagatctcattacagatggttgtgagccaccatgtgggtgctgggatttaaactcagtactcttacctgctgagccatcttgctaaccccaagggcactgttctcaacactgttttggtaacagggctgacgatagcacagagcttaaattgctcctgtcctgaagaatcctctggaatgagctctattatacaagtgataaaaatgacacagtcaacaaaaaattgccttaagccttctgtaaaaaatattttatatttcctaaaatgaaaactaattgctcagtaacagggacagcattttccaataattcagtaataatgaggaatcattcataaacctgactatttaaagaatagtaataagatttagtaatataaagttatcttcacatgaggtggcacaccttttgttccagcccttgggaggcagaggcatgagggatctcttgaggacttcctggtctacatactgcattctaggacagacagagctacatagtgagactctgtctctctctctcacacacacagacacacgcacgcacgcacgcacacatgcacacatacctatatgtgactttgctaggcagttgaatacaaagcaaggttatgtaatagataacccaactcatttaagaaaaccagcattgtcttcctctgcttcacatgggacagagaaaattcagctctacagaattgggcagttaagacgaatttctttgagatagtttcctatagcactggctagtcatgagttcatgaattacccaagtcaagccatgagcgcagggtcctgaaatacaggtatatactgctattcctgtctctgatagattctaaggaacttggtgaatctaacatacatataaattggatagttgtgatcatgaggcttgattgttacgtttttttgtttggttggttttgttttttaaatttcttttaggaagctgtcatagttgagccagcctagctttgtatatttaacaaacatctaatcttatgagctcaccagccatgagagcagagagtaagtaaggcattacatgggattaagctttggtctttatgttggtgtccgtccttactgtatagaccaggccaggtttgaactcaagatcttctgcctgccccagcctcctatatactagaattacatgtatgtgtgactgtgccaaattggcaggcttttggacttttggggggttggtataaatccatttggtattttgagctttgtttcacagcaacaccttttttttcccttttttaaagcaatcactttttgtttgattggttggttttgtttttgtttgtttgtttgtttgtttggttttttttttttcgagacagggtttctttgcatagccctggctgtcctggaactcactctgtagaccaggctggcctcaaactcagaaatccacctgcctctgcctcccgagtgctgggattaaagacgtgcaccgtcactgcccggctaaagcaatcacttaaaataacatctcatctctgtaatctaagcacttagctgaccactagtttaaagggaggggaggtaaatttttgtttgtttgtttattggtttttccagacaaggggtctctgcatagacttggctgtctggaaactatgttgatgaggctggcctgtgaactcacaggtgcctctgcccccaagtgctaggattaaaggcgtacaccaccatgtcccacctgttgtttattttgcattatgggtgttttgtctgcatgtaggaacctgcagaagccagaagactacattagatcccttgagactggaataacagatggttgtgagcctctatgtgggtactagggattgaacctgggtcctatggaagagaagatagtattctttcacttccgagacagttatgcatctttacagccctgtttttaagtacaaaaccaaacacttttggttggttttgtttagagcaaaacctaactttatgggcaggttgattattaaagtctcaaatggagctgggtagtttctacatttctaaaagttcctaaaagtctgtcccaggatcctgtggggagctagagagatggcagttaagaatgactacaacttttgtagaatatcagagttcagttcacaactggcctctgtggatagatacctgcatgtacatagtgcatataagttcagacaggcatatatgtgaacatacacaaagaaacacaaataaaagatacaagaaaaattagttttcgaagataagattcactattttggcctggttggcctggaactcagattatctatctcttcaaaagtgtaaacgtgtgttctagcatgcagaccacattaaaattttaagtgtggtttaagcagtaattatcctgtttaagcagtttacagttaagcaatttaatgagatactagttttttctttacagaagttgagatttagttatgttttttatatatgtatctatacatatatatgtatacacacacacactttcacatacatctccacaccccaagagggccttctgatccaccatgtgggtgctgggatttgaactcaggatctctgaacaaggaaaccagtgtgctgaacaagagagatggtgcagtgcataaagcaattgctatacaagcatgaggataggagttaagtgaccactacccacataaaacatgggaatgtatggcctctcctttgtcagcaggtaagaaaaagtaatccctatgccaggttggctagctacactagttaaggtgagctctgggttcagcatgggattcatgctcagtaaataaagtggggaatgggtgacatctgatgtgaacctcaggcttccacacacatatatgtcctgtcccctaaatttttttaaaagtcaaacttatactaaaggggggggaaaagccagagaaacaaccaaggaaagcattgagcatgtctgtaaagttgtttcatagtgagggatggggtatctagattcaggtaacactagaaataatattgattgttcctaaaaatcaagtcctaaattcctcatgttaacttgtatgttaagaaaagcaaggactggagatgagcccagcagttacagtagttactacccttgaaaagacccaggataaaacctcgctcccagctggggcacctcacagctgcctgtaacttcagctccacaaagctgtcagcgcatgatggctcagatataactccagttccaggtgatctgacacctcttggcctttgcagacagacaacagacacacatgaggtacacgtgaatacaggcaaaagaccaccgtatacataaatgtgaatctcttttgaaagtacaaagtacttttgaaaaatgagtgtagatatattaagcagagtgctttgaggtcaagaccctttaacactgtgaggacaggtcataagacactgagaggtgaaggactatgggaggttccccacctccacacaccctcagaccatgacagaccagttgatcttgaagcttgacctgattacacggggctggcatttcctgatttcctgtaatcactcctcccgcttcatgactaatagtcagtgtcagtctttccattcttgccatggaggttaagacttttggggaaaaaaacagctttaaaaagaaaaaaaaaaaaaacaaaaccaacaacaaccacaggaaaggggtcacttttgctaagatattgtgacttggaaaaatacagtgtttaagcttttcttgtgttagaacatgtagaggatttggggaggtggctgggatgtgaggatagaatggtgtaattcctgcttccatgtattaatttgacctccagaagtgaaagatgttcatagctcaacgttcagtttcagggctttctgaactccacctgttgaggtacatgtccagcccaccccaaccccaagtgcttgggattaaaggcatgcaccactgcacccagctaaaataaaatactttttattcacccacatacatgtatacgtaaactgttttccttgcatatattattatttatgtttaccttaagtaaaaaagatgtttaagtattcttacttaaatctccttgtaaggtaaagaaaacttccattcatttataaattatcgcaaaaataacttttaaaaactgactcttaactgtattcttggtagactaacctttaaattgtatttttcttcagagtgaaaatcagtattgttatggaaaggaaagagctaagaacttacagagccaagaactacacgtgagcagtgtcaggtgttaagcaaatggaaggaggtttataacacatgctctcattcttcctgcctcagcccaaagagaggaaaaaaaatgtggaggaaaaaattgcagagcactcccttggcaagaataagaactttccactaccacgtgccctcaggcgctcactcgcccattagggaacatcactggatgtgatcagcagtgtttccttgcctgcttcccaggcagagccctgtctgaaactcacaggagcctgtggcgtaaagacaattgttatttttcctttgaaaaatattagacagatctttactttcatagatttattttttaaagctccttaatagatctgtcctgatgtgcaaccaaatagacccttagcaaaagatgtgaagcagtcataacaagctagaggaagtctttcattaattgagcttcctgaagtaaaactctctacttcctggccttggtaaaacaaggtcatgggttggccaagatgatgcaaaggctttctagccgagagaatgctagcacatagtgggttataaaaactaattcgggcatacttccttcatgtctttccacagagacgatcttgtgggagctagtatttctggtatgcaagaaaatgtaatagagactgttccaaaaagttcttttcagaatctgaacctgtggttatgagtattctccccatattgtttttttaattgtatttctgtgtctgtgtccatgttcatgtgtgtatgtgtgtgtgtgtgtgggggtatatatgtacaagaatgataagagaacaagttaggagttcactgtcttatacagtatgggtcctagggattagacttccagttgtcaggcttggtggcagtcgattttagctgctgaatcaccttggtagcctgccttgtattaaatttttacacttgatcttagctaaaaggctgaaaagtgatgtaagaagtaagtcagcagaggaaaatgaatggatagattcagttcagccctgtctgcctgaaattcactatgtaaaccagcctagactgtctttgaacaccatggagatctacctgcctcccaagagctggggttaaaagcttgtgctaccttacctggcatcaggtgttgcctctttattcatgagtctgatatatgtttttattttgtcttttaaactgttaactgaagttctttgtatgtcaccatgatccagcacaagttgaattacaaacaatactcctttccgtgcaggagaaagtatggcccacgcttagttttaacatgcaaatgtagagtccgccaaatctttggacagctatggcccatggagaccttggctcagaaacaacaatgcttgaagaagtagtgacacagaaaacagcaccccatattcttaatatatgaaggattttaaaatacaggaaattactcacccaataaacgggactataaaataggcccatggcttcagaaaaatctaccacccatggaattctagaaagaatccaatccttatagtggtcaagcacacctttcattccagcagttggcagacaggaaaggaaggtggatctctaggttcgatgccagccagggctacatagacagaccctgtctcagaggagagagagagagaaaaaaatacacctctagggctggaaagatggttaagattactgactgcctttccagaggtcctgagttcaattcccagcaactacatggtgggtcacaaccatctgttatcggatctgatgctctcttctggtgtgtctcaaaacagtggcaacagtgtactcacatatataaaataaatctttttttttttttttaaagaaaatgtacctggaaacttttttaagaggaatctgtttatgtcagcatctaattgacaatttaatcaaaatcccattggatcctttttatatgattgtctagtaatgtcccacaggcatccaaacctgggagtttgagaggtaatctggtcgcctccttggagtgtgaattgttaacgtatagaaagtaagaagatagggttggctttgttactttgctctttttttttttttaagatttatttatttattttatgtatatgagtatactgtagctgtacagatggttgtgagccatcatgtggttgatgggaattgaactcaggacctctacttgttccagccccaaaatttatttattaaaatatgtaagtacactgtagctgacttcagacacaccagaagagggcgtcagatctcattaaggatggttgtgagccaccatatggttgctgggaattggactcaggaccttcgaaagagcactttgctcttaaccactgagccaactcaccagccctgttattttgttttggctctaggtagttaacttcagtgttaaattgagccaaagtcattttctatatattataggcaacttacttttcttctactcaagaagataatcatactgagaaaagtcgtaaaaataatacctgatggttgagtaataatacctgatagtgtctggggactacacattaaacaccctaacagcctcattccttgagaccatggaggtgggtaaaattattacctttttttttttttttttaactgtccaagaccagtttaaagatctggtcctcagggatcatttgggcatgagagtaacttttagctccattaatctttcttttattggttattccaactatgtgaggataaatcaaaggccttgtttgacaactgttgcactaggaagtaagtaggaagtttcctgtttgttaaggctctctttgtagtgtggaccttgattagcactcaccacaggaggtctccctggacacaccctgtacttagctggctttggggagcaaggatgagagtcgtccttttcatccctctggccacagtagaaagaccttccgggggtattggacacccagaaggtcagttactcctgtctaggactaaagccagacacttttaaataaaagttcttgtaattgttgatctttgaccttagacacttggatattatacatatcatctcaactttatcctttatgtaccttaaattactcaaaactaacttgcatgagatttctacttttctattctgaaaacatccatcaatatagatttttttcctctcattaaaatttctttattaaaatacagtcttttaaatattttgtttactgatgtccttttttaacaacatgagaaaatagaattactgatgtctctgtttttgaggatttctcctgggggggggggtgactaaagcagtgtctatcaccctgggaaacaagtgagtttcttaggcttatttagaattgtcaagaagttactaacggggggggggggggggggtggtggtggtggagaagttactaacaggggtgcaggtgacataaagccacactggaaagtctttacccaggatgtagccgggctttcacatggccacacagggagctctccctttctctaggtttcccagtctgtcaccccagatcctctataacatcttgaagctttgtatgattatggtctcattataaagccagctgggatggccctgtccatctcctccttttgttaaggagtataacatttagcctgttcccctgtgatcaatgaagacaacacttagagcagaagccctgtactctaagaaatagacacatttacttttaaccttatctgtagggcagatgacctgctgtcaatagagttttttaagttttctatatgaatatacatattaagtatgaagtaagcactataaacactcatattactttgggttgggtttgttcatttgttttcttaaaaactgagtaaccacatagaaccaccattttctcttgggcaggggtgaaatgctccctcggatgaaagagctccaggttttagttggaccttttatgcaaaagaaaaagatcaatgaggcagcagttcaattcagccctgaggcacagagagggcaaaggggggggggggaaacgactggtcgagaagagaaagatgtgacagagaaggaccagatgtatatatattgtagaaggtgtcaatcaacattgttttctcaatgagtaacagtcttcatattaggggaagagtcattgactttataatgctatcataaatgtcttcatttagcatgtatgtttaggtattggttttaccttactctaatgttgtgttattcagaactttcatcttgtgcatttattgctggatgtggaggcacaggcttataatctcagcattctggaggcaaacgagactctgaacagagattttgtttcaagaaagcaaggatttgccttaatggccttggtttaatcttcaacaccattgggttagagggatggtttgtcagttagaagcaccacctgctctaacagaggaccaaagtcagagtcctagctggcacctatgttgggtagcttccaaccatctgcactctgagctccaagggatctgatgcctcttccttgacctccatgcacacacatatataagagcatagacatacaccccacttcccttcccccttggggcaggtgatgatagggtttcactatggctgtcttgaatatcctgaaagtcattgtgagaaacaggttgacctcaaactcacagagatccacctgcctctgcctcccgagtgttacggttaaaggtttagcatcatattttgccctttctattttattgtgatgtatgtataatgtgtgtgtgtgagatgtctcagtgtgctacagagtgtggaagttggttctcttctctttccaacatgagatccaaggattaaactcaggtcctcggcttgctctatgagagctttacctgatgagcaccttgtcagcattagatgatcttttaataatctgtataggtggtacgcctactcatgtctattcaccatattcccaaagaagccagaagagggcatgggatcccttggcattggagttcaaggcagctatgagccactatgtgaatgttgggaatcaaacctaggctctctaaacgagcagccagaactcttaacctctgagagctctctctagctctcttaggtggaagtttgtaaatacagttactgtctatcccatcagttatagtgcagagtcatgaatgacatcagctgtagattgctagcacctctgtacctcattggacaaaaaaagtcttgtctgtagctcccataggattattacataaatcacctcggacatcaaaggaacatttgaaatttttccatttagagttataatacttccagttgaccttgtactcatttcatgttaaatgttaaaaggcccagggaattagattaatttgtgacgtgcagaaacaatggtagtagtatagcataccagtatactactttgtatagtagagtggtagtggcataccactaagtactgtggctgagcaagaagattgccacaagttcaacactagtaagagactgtcttaaagaatacctagtttaaaaaacagaaccatacattccaggacagccacatgcccaggagaagttggccaacacaaaactaactagtatttttgtgaggtttttaatttttattttgtcttgtttgggtatttcttttatcttagtttttttgtttgatttgattgttttgtcggagagggggtgatttatttttatttttgttttgtgaaagagcataaagttggtgggtggggagctagggagagtctgggaggagaaaacatgatcaaacatattgtatgaaaagctctaatcagaaacaaaaccagagtcgctaagatggattagcagtaaaggtgtctgctgccttctgatgacctgagtcaatccgtgggacccacatgataacagacaactgacttctgaaagatagataacctctgaccttcacactgggatgtcccacacatacaggttttttgtaatttagtgattggtttgttgagacagggtttcacagcttagacctgacttgcctgaaattcagagatccatttttgcctgcagagtactggtattaaaagcatgcaactgtcacgcctggtcttaaactttttgttgttgttgttttgttttaatgtcataatcatttggatgtactccctttggtataccgtgaacaaagtacattaaagtggaaggtttgttttattcagttggaatgttgctcttggttgcataagcatttccagcaggaattctaccttcacctgtgtgtgtccctgtagtcaaatgcaaggatgatcttaacccctggagatcttggacctacctactagctttgtgtgctgccttgctttcctaggcgtagggtcgtttcatgcactaaaacagcaggggttgcatgtcagattcgcctcatatcagagatttatgttacaattcctaactagtaaaattacagttatgaagaagcaacaaaatatggtcgaggggtgccacacacagcatgaggaactggactaaagggattaagcattgagaaggttgagagccgccacagcaggaaagttttttaaaagttcgctatattctccttggagaagggttaacaagtgcagggcatacttctaggataggatggctgctttggcattttctagaccactttgcttggaagttttgcactttgaggctggaggcagtcccaggcactgctaagcaggctgtcttctgagcatagccagttcccatcttctttaaagttccactaaatgggcacattagttctcttgcagaggtgctgttctcaggggtacatagagcttgggttttgtcccttactcggtgtattttagcattttgctttatacttaccaagtgctcagctaggagccctgtggggctattacaggaactctacccaggaaacaggttgttgactgaaagatcttcaggttatgcaagagatttatttattagataatttaaaaggtactaaaggttatagggtgaaatgtctctctccactgtggcctggaaacccagtggtgctcatttgttaaacattacagcactatcagctctgtgtgtgtggttctctcctgtgatttcccatgtgatgtacaggtaccttaggaaattttcaccacagtgtgtaaagtggtcacagctttcactgcttacaaaaattttgagcaaagtcataaaattaagctttataaaagtataatgttggcctggagagatggctcagcagttaagagtactgactgctcttccagaagtcctgagttcaaatcccagcaaccacatggtggctcacaaccatctgtaatggaatctgacgccctcttctggtgtgtctgaagagtgcaatggtgtactcatattaataaataaatctttaaaaaaaaaaaaagaatgttgcagctttgagacagcaacagaagtcctgtccatgtttcatttcccttgtatcctgatttccgtgtctagaagcacaggtaaagtatgataatcaattagctagtcatactctgtgacacggaatactggatgagctctttatatacatggttcttctttagcactgagagaattttcattaatttctgcatttgtcttgctttttacattatttggaggtctggggacaacctgagacagtctgctctctccctctattgtggggatcagatcagccttcaagtgactacccactgcacaatctcactgacctacctcctacctctagctttttacttaatttttacgatttgtgttattatgttattgtgtgatttgtgttattgtgttattgtgtgtgagatgtgagatgtgggaagagactttgtgaagtccccccaccccccatgggttctgagaactgaacccatggaactctcatttctatgcttgcatggcaagctataattaacaacccatccccccagccttgtttgttctttctcacccctatggaagctggcagaagtttagacgttgtgaagtaagagtcatattaccatatagcttcaactcaggtctgttttcttatttcttgacacttggaaggtaaaatagcatttctactgctgtgtatttgttttgtgacataactgatggaactatttgtttgttgtctctgttgcttttctgatggatgttcctgtgtatttcagaaatattctgtgtgtgtgtctgtgtctgtgtatgtgttcggcctcagattcaatgcaccattgagggagagcttgcagtcttgatcttctggttggaattacaatgtgggtaccataggtagccactcagttctagggaccatgccctgtctaccacctgacccccccccagcccccatctagcttgctttaaatacaaactacattgtagtgtatgttgtgtttacaaaaagatcaagaagggggggatatgttctatgaaggtgtagtcaggtatgggggaggggtgcctcagtgggcccatgctaagacatcccttccccctgagggacagccacgtaaccatatagtatggggagaggggagtcaagagaatagtagaggcagagagagagagtagagaagtagaggccggccatgatcccatggggagaaaggagcaagagagcaaggagggagggtgcaagcagccccttttatagtgggttaggcctgactgttgccaggtaactgtgctggagcttagacagaatgctaacagtgtacattggccatattctacccttaatctgttcactctgctcagaaatagagacctatttacccattgtgttgtatgcaaggtatttggttttaaaaagcatgtttgatatggaatcattcatctttaggtaaccataaaagttgctcactttaactgacccctccccccttttaatctcttaattagttggtgacaaagttcctgctgatattagattgacatccatcaagtctacaactctaagagtcgaccagtcaattcttacaggtaagtattatatatatattggaaaatcactcaaatttgaagcctcttatctctcagctatatgtacccctttatgggatcctaccctaaccttctctaagatactttatttcttagttatcatgatccagggtggaatgatatctgctggcagggttgacaggtttaaagaagtgctggcaggctggagacatggctcactggtaagagcaccaaccactcttccaaaagacctgggttcgatccccagcatccaccaggcaatcacaactccagcaccctcacagacagacacgcaggcaaaacccaatgcacacggaacaaaagagaaccacacagtacattgatgataagccaggcatggtagctacacttctaatactagcactttggagacaggcaggaagatctcttgtgagttcaaggccagcctattctacagaacaagttcaggacagccagggcttcacagagaaaccctgtctcaacaaaacaaaacatacatataacactttctcttcccacccccatacatacattttttttaaaagatttatttatttattatatgtaagtacactgtagctgtcttcagacactccagaagagggagtcagatcttgttatggatggttgtgagccaccatatggttgctgggatttgaactctggaccttcggaagagcagtcgggtgctctaacccactgagccatctcaccagcccacatacatttttttttttttaaatttaagtgctaacctgaatagcaagtaaatataaactttaaaggctgtcaatatttatttgggttccgttttaaaagtaactaactgatcataattcggtaagtccatgccacctgaagccccccttttttttaaagatttatttatctatttcatatatataaaagcacactgttgctgtcttcagacaccagaagacatcaagtcccattacagatggttgtgagctactatgtgcttgctgaactcaggacctctggaagagcagtcagcgcattaacagctgagccatctctccagccccaatccagtcagctgggctttaaacacttgttttatacaactgcttaactagtaaaattccctttagcaacatcagcttcaagttatttaggccataaaatgttagggaaatgattggactgtatacctgaaatcctcgggtatgcctagaaataggagagaaaactgaaaagggatcagaatcttgaagggtccctgtttttcctcttggctttttgaagcaggatatcctgtaggccaggctgtcttatcctgtaggccatttgatatatagctcagaataaccttgagctgctctgtttactgtctgtcctgtccagcagttggcataaaagcatgtgccgccactctcggcttcatatactgccggagatcgaccccagactttgcatgctaagtaagcactctgtcagctgaactccattcccagcccaactgaatgctatactaaacataggtcagacaaatcactgtatctttggctcttccaggaatatttcaggatgttatttcaacattactttttatttttaaaattacactttttgtagtcctgacattctctccattactctgacattaatctccattactaagttttcctagtttgcctgttttggatcggttgagccctttgttctttctcccatgttggaaatggctatgaactttcttgcttgtttatgactgggtctcactgtgttgctcatcccgcaaactggatgtgtagcacacggtggccgtgaacttggaacttgacttgcctcagttcctgtgtgttgggattataggtatatgttaccacaactgctcacattggcagtgataaaacagtgggaatggggtgctgtgggattggctatgccgcagatagcgttaaccatcctgtctcataacctgcataggtgaatctgtctccgtcatcaagcatactgaccctgtccctgacccccgagctgttaatcaagacaaaaagaacatgctcttttctgtgagtacttttatcagatgttgggggtaaggtttcctgggggttgaaccaagggcctcagctaagagtgtacttttatttggagatagtccctgtcttaattagggtttctattgctgtgaagagacaccatcaccatggcaacttttataaaggaaaatgttttataaaggaaaattaagggtagcttacagttcagaggtttagtctgttattatcatggcaggaagcctggtggtatgcaggcagacaaggtgctggagaggtagctggaaaaagttctacatccagatcttgaggaagtgggaagagagagtgagcctcaagaccccacctgttcccaataatgccactccttatgagtatatgggggcgttttcattcaaaccaccaacatcccaaagttctgagtcttttctttttactggccactctcagtggccagacgtaaaaaaataatcagttattccaaagataattattctttggtatgtgtgtcagctgtcagaaaaaaagaaaaaagaaagaaacatagctgggggagtgatttgctgaaggcactggcaacaaagcaaatgaaccaaactagagactgtaaaatagtggcatgtgtgacttgatgctcatttcagttgccatctaatgaaatgattagtgcaaacatgtttaaaccccattggtaacacttgagaagtaactgtttataggttgcaggcattgctgctgcatgtggctgtgatttaaaagaagtctgtgtttggaaagagcaagcatggtttaccatgtgagccgaggtgaagaaagctcctgtgtgcttattttttcagttgaaaatgaaattttttcaagtagtatagaaatctatgtgttttgattatttacaatctagcttagtatatttcaaggtgcgggctttgctggttagtaggagcacttaaccacagcagcaagtagatcgctctagtgagaatgattgctgccctatccagttaaggtggaatagggcgagaatactcacgtttcacatctgacttcactgacctcagtagtggtactggagtagaaattctgaaacagcctacaaggctgattatccacgcttagctgtgacaaaagtggagtgagaaacaaagataaaagaatccatagtgctgagagctgcatagaatttgaaattacaaaagtgagagtactgccgagcccagagcagatctgtaggcaggttccctgtgtggagagccgtcctgtcccagggagtgagcaggtgctctgtggagtccaggcagtatccacatcaggatttaaggtgggatgtgctggtgccctcatgacccattttcctcttctccctagggtacaaacattgctgctgggaaagctatgggagtggtggtggcaactggagttaatactgagatcggcaagatccgggatgaaatggtggcaacagaacaggagagaacacccctacagcagaagctagacgagtttggggagcagctttccaaagttatctccctcatttgcattgcagtctggatcatcaacattgggcatttcaatgacccagttcatggtggctcctggatcaggggtgccatctactactttaagattgccgtggccctggctgttgccgcaatccctgagggtctgcctgctgtcatcaccacctgcttagctcttggaactcgtaggatggcaaagaaaaatgctatcgttcgaagtctgccttctgtggagacccttggttgtacttctgttatctgctcagataagacaggcacacttaccacaaaccagatgtccgtgtgcagggtgagtaaggggcgttctctgtgattcttgcctgcagtctgtgggtggtcatcccacgtggtggaggagagaaaatgctcctcaaagttatcctctgacctctgcatgtagttccgacacacacaaatacgtggtaaaaattaataatcccccactgccttgggaaatacagaatagctgtaaagcttatagatttttattaaagaagtaactggaggtttcatcctctttctctacatgtgtgtccagaggaagcaactagttaaacctcctgctgaagtcagttgccatttccatagcacgctaaatgaaacacggtttctctctgacacatatgagcagatacttgcttataagttggcattttctgctttcttctcttgttagaatgtcgtttgaagtaaaataagaaaccttttaatgtgctcagtaagaactgaaactgagcacagtgacccacacgtgatcagtcacagtcctgcaggcgaggcagcaagatcagacgtcaggattgttcttgactacacagaaagtttgaggctagcccaggttgaatgagacattatctatcggatttaaagaagaaaacagaagaattgagaagctaattgttacaggcatatgcatatggcatatttgaggctggaacaatagacttttaagtggtggtgagggtcacattttcaatgaaaggtcaaggtaggtttttttttttcccacagaaaagataggctactaactcaggctttgctgtttaacttagtgatttgtgtaatcttgagtgaacctatttttcctatgatttttctataaaatgagcacgcacacccatgtagtggcacatacttttaatcccaaaactcaagctgaagaagcacacatcatctctgagtttgaggccagctacacagtgaaatcctgactcccaaaaggaggtagagggcgatggcaagcaagcagctccaggactgatagacactgattggagcctggttaggaagaggggcccaggtattctacagcagctctgcctactttacttgagtgttttgactctgaactatgagtttcttcttcttatgcctgtttttaaagtaaaacaatagaatgaaaatctctgggctacttgatgtagaattctgagcattaaaaacaatcattggtgatttgctgactaagaatccccctatttttgcttgggttatcttagactacatcactgtttagacagttaggttgaaggctctctgagctgttgatagagcattgctgtgagggggaacctggttgagcattgttcagacttccttttttgttttttggaggcagggtttctctgtgtagctttagatgtcctggaactttgtaaatcaggctggcctcaaactcacacagaggtctacctgcttctgccgcctgaatgatatgattaaaggcctgcaccactaccacctagcacaaaccaccttctgaaatgacaggatttttcactgtagacaaggaattcttttgtgtatatcttacataaaacttttgttttgtgtttccttgtagatgttcattctggacaaagtagaaggtgacacttgttcccttaatgagttcagcataactggatccacatatgcaccaattggagaagtgtgagtaagctctgtcactatggtgacttctggttagaccatgagggatgggtctagaaactgttgctgttgacagaggtctgacttagtgatggacctaagatatgccttgctgtgatccccagaagctctgaataaacaaacagcaggatgtgcatagtgacactgtggcaggtcacaagatcgtagccagcctggactccgagagaaactgtctcttgtgtgctctctcttagactcacacaaaagaaactgttgctagatggctgactggctcaagttagtggtttttaattaataataccttttgaagcctagacttgctggtgaaggctttgttttgttcttcacttactggtacactgttgggttttgatgaaaatttctggtcattcaaattttttttgagtctattccaatttgttcttcccaaactccattttcatccttggggacagggggctgtcacatgcctacggaagttcagggccatgctggaatagaaagtgagttctagttttcaacaaatgggaggtagagtgtaaaaagcactttctctgtgtgtgcagcaatgggagtccatctcacgacccttagtggtgaaggagaggaggaccttccacaatttgtcctctgacctcctctgtacatatgtgccgcattgtggcatacagcttctgtttaggttctgtttgtttgtttgtttgtttgtttgtttgttttaaaactaaagttgagtaaagctgtgatctagaaatgtttttctctttttataggcaaaaggatgataagccagtgaagtgccatcagtatgacgggcttgtagagttagccaccatctgtgctctgtgtaatgactctgctttggattataatgaggtaagactccttgtaatgttctgatgctggctcaagggtagggtgagtggaattttatttctgatttctagtcccgtggcctggctgaaaaaaggccaggtgcccttcacagacctgcagctgggcactacagcttgttttactaagatacatagttgtcatgatgttctgaccactgatgcaccctttaaaggaccagagttccagctacaagtctttctgagagtgagggtgaggactgtactttttttttttttttaagatttatttatgtatgtgagtacactgtcactctcttcagacaacaccagaaaagggcaacggatcctcccattacagatggttgtgagccaccacgtggtcgctgggatttgaactcagaacctttggaagagcagccagtgctcttaaccgctgagccatgtctccagccccaggactgtacttttaaacaccaattgccatgtatcctcgagcacagtctggagctgaaagggttgttttggtggtgtagtgaagagtgataaccaagagaaccttttacaagttaaatagtggggttattgatttgctttctttttcaaaggtcattagaataataaacagtgacctgaaatggtcaaggactttaaatgaataaacatcttaatatctgggtttggtgtctcatggttacaccgtcttttctcacatgaaccggggaggacaagctattctgctgacattgacttcttttgacaatgcaggcaaagggtgtgtatgagaaagttggagaagctaccgagactgctctcacgtgcctggtggagaagatgaatgtatttgatactgagctgaaggggctttctaaaatagagcgtgcaaacgcctgcaactcggtcagtattgagctcagcacagtatgctgctcttcttcattacactgttggtttaactgttgttcttcggcattagtttcctgatggtcacagtcaggtacgatggtctctcatgcctatatttctagagctcacgatgcaaataccaggagaattgccacaaattgtagaacagaactcattagacagacgaccaaatcacattttaaaaaacggaccaaaacaaaacaaaaatagcccagcaatcattagtaccttgacataggtgtatcataagggctctaccaagggagctatccctagtcctgagaatacccagccctcctgcctgcatctcagtgtctttctctgtgcctctccagtagcataaagaaaataattgtatgcttttaacattagagctgtcccttgccctaattgtcatttgacaccccatttgtttaactcgggtgaaaaaaactgttgagtgttcattctcacttttttctttttgtttggttagttggttggtttttccagacagggtttctggctgtcctggaactcactttgtagacccggctggcctcgaactcacaaatccgcctgcctctgcctcccaagtgctgggattaaaggcgtgcgccaccatgcccagcttgtttcatttctgttttctcaaatccattccagtcaggctcttgcctccacctatcagtccatcaaaacctcttttggatcacttataactttgtgctgaatccagtggttaatttgtttataactgttaaatgtaacaaaatagacaagtcagcagttgtggattttggacctggagatggctccatggttagaagttttaagggcctggatttgactccctcctcaccccaccccggcacctaagaactgtctgtttctcctgtcagacggtcagagggtgccctctcctgccttccatgcaccaagcatacatgaggtgcaggtgtgcatgccaaattaaaatggtgtgtctcggagagacagctcagtggttaaaagtactgactgctctctcagaggaccagccaaggttcgtttcccagggatctgacattttcacacatgcatgcattcaggcaaaacaccaaaggtcataaaaaattagcactaaataattattttgagaaatgaaaaagaaagctagaaaatgagggttctgatgtatcccagaaatcaacctaatgactactgagatggaaaacaacatttgaacaacaatcaccaaaacttgtttgttagtttggttttgtttttttgttttgtttgttttgttttgtttttcctgttctgttcttccaagaccttatttctcagtgtagcccaggctgtcctgcaagttgctctgtagacttggctgtctagaactcaagaaatatgcctgcttctacctcctaaccctaaccaccacacccacccgtttttctttttctttcctattttttagttgaggctgggggttcttttagtattttcaaatgcatacagatgactcaaaatagaaaatgctgctgttccatgaagcaaggctcatcaattaatcatgcagactatgtttttaaaaagtcagccagctaaccctgatgatattgaagtgtgttgataactatcaagttctctatggatttgtttttagagtgtgtattttgtggatgggcaaggccagcagcaggcctgtggttagcattgcttgttaccaggacacagcctgccatcactggaaaggaaatgtcagtgaagagttgtctacattggcctttaagggattcccttgagttaattgaaatgggaagaattctgaactaccctggtagaaggggctactaaggactagtgtatatacactagctctttgctcttgactgcaggtgtactgtggttaattctctcaagttcttgccagataggctgtgacttgcaacagataaactccctcctcttatgttgccactatcaggatatttcatggccaaccaggaaaggcactcaggtacttaaaaccccaggttgggaggctcttaagttcatggccaacctaacctgggctatttagtcatctcacagagttgatatagagttagaaattaatgctacaattttcagttgagagaatgttaaaaactgaaaactaatgactataggattacaattataactcagcatgtgtttaaggaagcacagcacacacacacacaaacacacacacacacacacacacctcaagcagttacaatctatcagtcacctaacagctaaaaagttaaaaagttgatgggtcatctcataactttcaacaatgacataaggatattttaatgcttaattagagcattataaaataataatctaataatgatctgcataatcctaatggcaaaggtcattcagtggggcagtggtgggggatacaggaagtagctgtgaatattgaatcacctacactttgtgggggtggatctagacagcgtttctctgtatagccctggctgtcctggaactcactttgtagaccaggctggccttgaactcggaaatctgcctgcctctgcctcccgagtgctgggattaaaggtgtgcgccaccatgcccggcaaatcaccttgagtcttgagcatagccataagctagcatcagcatgggcaatcctgcctgtccaggaaccgctgctgtgcacctccagaccatcatactacagctatctttccacactcttcctcctcttcagcttgcaatagcttcatgagattagccagtctgaagttgaataaaacagttttgtggctgctgacagatatttgccacctagttattgtctctatagacagatcgattctacctgtcactctgcttggcttagaaccttccgtaagggtgaggaagttgctcaatggtaatgtatttgcctgacatgcacaagctttatcctgctcaggtaggtaagaaatgatgtacagacaggatacggtagtcggagtgtcagtcagcgggagaccactgagtgcttgaaaaaaacacttgctcctctgctccctcattgaagttctgtgtccccaggcgtggcatctctcttgggtatctgatctcccctagcctaccaggaagtagatggtcattcccaatctctggccatttttgtgtctagccactcccatgcagcctttgaatactttgacggttcagagtctggtgggtcatagccaagctctctgtaacacggaagactgttctcttgctgcacccacagaacacatttagtgaccctcactgacagaacagtgtgactacaaggttttggagaacgcactctggacccacaccctgtgccattggagtagtcagctaactggcactgtatgacatgtgttacatgtctgcctttaagaaattcactatgtagctggggcaactcttgaacttggtatctatcctcctgctttggcctcccagtgctaggattatgcgcatgcagcaccacaccagctctctacacagatttttttgttttttgggttcttttgctttttggtgttttgttttgttttgtttgagacagggtttctctgtgcagccctggctgtcctggaactcactctgtagaccaggctggcctcgaactcagatatctgcctgcctctgcctcccgagtgccaccgcgcccggctgtgctatcagttctcaatagccaatgtttaaagctttccgtggttgtcctgcacaaatttttgtcccctatggccttcagtatatcttagttttacattctaatctacttccaaaccagagaacacttttgtgtaggtgcttgctatcttgttcaccgctgttgaggctgccaaaaagaccagtgtgatgaagatatctaaacaggggcaggctctatcatttaatgaaggtctaatgcgtatctgagcaggtataaaatgtctcctctctgatccccccacaggtcataaagcagctgatgaagaaggagttcactctggagttttcacgggatagaaaatcaatgtccgtctattgtaccccaaacaagccaagccggacatccatgagcaagatgtttgtgaaggcaagtgctgtgcagactgaggctttcctaccagggagacgggcagggcagttgctaatctgagtctcacattctcagggggctccagaaggtgtcatcgataggtgcacccacatccgagttggaagtaccaaggtccccatgactcctggtgtcaaacagaagattatgtctgtcattcgggagtggggcagtggcagcgacacgctacggtgcctggctctggccactcatgacaacccactgaagagagaggagatgcacctggaagactctgctaacttcatcaaatacgaggtacctccacctcacccgcacagccactgtccagcctctgctgccagaggagccacaggagtcacccttgtttagattgctgcttccaacagaaatagttaaggatttagtaaatctggtttcaaagtagaataatcaaaacaagttcagacaagcctgtcaaagcctaatggaaaccaagttactaatggatatttaaaaaaaattaagtattggtaaaaggctgagagatttcatttccacttcttccttagaccagaattttatatcagggatggaagctactaaacagaagggacagctttgctgtggcactgacactgccagcctctgagtgttcattctttaacactttgttctgttcctgtggtcaatctctcaaattccataatacaggccagacatagaaacacatggaagcagaatgctgctacactacaggtttcaggactgtagctaggaaaaccttgtttgaaccaagggcaagcagaaagagaaaatgacaaactcacagttgtagcaagagtgagctgccaggacactcgggtaggggtaagctgtttgagctcatgtggctctctcactttagaccaacctgactttcgtcggctgtgtgggcatgctggatcctcccaggattgaagtagcctcttctgtgaagctgtgccggcaagcaggcatccgggtcatcatgatcactggagacaacaaaggcaccgctgtggccatctgtcgccgcattggcatctttgggcaggatgaggatgtgacatcaaaggcttttacagggcgagagtttgatgaattaagcccttcagcccagagagatgcctgcttaaatgcccgctgttttgctcgagttgaaccttcccacaagtctaagattgttgagttccttcagtcctttgatgagatcacagctatggtaagattttagctagacttacacgacacaacagtgtacgtgtgcctataatcctggcacttagactgaggcaagcctgtgctacctagtgagatcttgtgcctaaaaacaaaaccaaatgaaaaaggcatgttcttaacctgtaagcaatacttagtgtgattatgtgtctgaggtgtgtaaatgaccttaaattatgtggccccaccacaaatggctctcaggttttgagtgttggtataaggcaatataagcagatgtccagtctccttagttctacctttctgtgatatgactctttaagcttgcatggctgtttttgtattttcttggtaaagtatttgacacagctactgctctgtcccgtttcctcctgcatcagtgcctctgcctagagctgtgccacatgggtggtatctgaatcaactgcaccttccctttcagactggtgatggtgtgaatgatgctcctgctctgaagaaatctgaaatcgggattgccatgggctcagggactgcagtggctaagactgcttctgagatggtcctggcagatgacaacttctccaccattgtggctgctgttgaggaggggcgagccatctacaacaacatgaagcagttcatccgctacctcatctcatccaacgtgggggaagtggtctggtgggtgtctgactggaactaaacagtatctttcaaggctggggccagggtgttgagctttctcagattgctgcttctgttaggacaaatttggttgttggcttgagaggagagaaatctcatgggacttgtctgcagctgaccagtggtgcagaaaatattcttaaaatggtagtttaaaatcataaaagtcttggtcctctaataaagtttcatatgaacttagattagatgttgtctgatgctcctggcttggggagataagctatttccatagttccaaaactcactgagttttttctcttcttcccttggatggaaacagtatcttcctgacggcagcccttgggtttcctgaggctttaattcctgtccagttactctgggtcaatctggtgacagatggtctgcctgccactgcgctggggttcaatcctccagacctggacatcatgaacaaacccccccggaacccaaaagaaccactgatcagcgggtggctctttttccgttacctggctattggctgtaagtacagttgttgtttgtgtggaaggatgctgtgtgcagtgcaggtcacccactgaaagcctctgttgaacaagcatcctgtccttccttgggttatagagaagcaacagttagacatcaggctttttatattttccccttgctcagagtgatgcaaataccaaggcatgccagagcccttccctgttgcgagcgccaggctgagacttgaatgggttattaccaactaggggacaagaagagtccactagcagaggctaatgccgttctttgtcatagttcagtttaaagagcatacaatctagagtggctgccagttcctctggccttcacagtatctcgtggaccagctgccctttgggcaaataaaaatttccattccctgtcttttaaactagtgccctcgtgcaccactgtaattccaggttagctgtgtgctctgctgttggttaggtgattgaccgtggataaaccagtctcagctttgcaaatttcctgaaattgatgaggaatggcctctgccttagacctaactctggtgctgaggggtgggggccagcattgtaatggcagttctttgaaagggttctgcttggccatacctggaacagtgcagttacctagtgtccaacaaggtcacctccgtttgcctatagactggtgtgacttggtttcctcagttccttgtgtgttctgtctgctgggatggatgggcctgacctccacctgttgtctgaagcctatacttgctctttagctctgtggcacctagtgcagggcgtgggctggggtcagcaggaacatttcctcacaaactctagagacattgcctatttcctttttagaccagaaacgccctgtctgtagtcagctgctctggccagtgtggtaacctgcagctttgtttctaggttatgttggcgctgccaccgtgggtgctgctgcatggtggttcatcgctgctgacggcggtccaagagtctccttctaccagctggtatttagccacttttttttaaagccctgtgtagtagagtgaattcttgtaacctttggtctttttctgtggtttggggtcagatagttgcctcaggtagctctaagacccagggcttctgccgagctgtattccgtattggtgttgggccttgaactcagtgtggaattggcatctacatttgggaagtactcccggctgatggaatgtttggactttgttgcagagtcatttcctacagtgtaaggaggacaacccagacttcgatggagtggattgtgcaatctttgagtccccatatccaatgacaatggcactttctgttctagtaaccatagagatgtgtaatgccctcaacaggttagtggatcttgtaggctatggtcctagggtttatgagaaaatcatggctgatagctcttccctcacaaaaaatgacatagttttaagctattgttccccaggaaacagtgggggttgtccccatcatgggttcctgatgcggcagggtgtatgaatgggaccagcaatccagactatgcctgtaccctagagagtggagcacaagaagttccatctaaccaagccactgatggacacaagtttccaaatggctctaccttgggtcatcaccagcagctttgagcctgctgagatgggcctgctgcaccaaagcctccagctccccgcactggggaaagcaggcctttagagttagttaggtcagcaggcagtagcatcactaaacccttgcctgcttgtgtgtcactgacgcatgcctttgcctctggtgaggtcacttctcttctcacctgtagcttgtctgaaaaccagtctttgctgaggatgcccccctgggagaatatctggctcgtgggctccatctgcttgtccatgtcacttcacttcttgatcctctacgtggaacctttgccggtgagtcatgatggaccccgggcggggtctggggtagttcctttcaggcagggccagaagcttgacccagccttgtttgtctcagctcattttccagatcacaccgctgaatctgacccagtggctgatggtgctgaaaatctccttgcctgtgatcctcatggatgagacgctcaagtttgtggcccgaaactacctggaacaacccggtaaagagtgtgtgcagcctgccaccaaatcttcctgctccctgtcggcatgcaccgatggcatttcctggccgtttgtgctgctcattatgcccctggtggtctgggtctacagcacagacactaactttagcgatatgttctggtcttgactgacagcgctacatacagaagatgtttaacttaatcaattaattttttattgtttaaagcaactgtctatttctgctgaattttcacatgaacatattggctggtgaaggaggtttcatatctagattttgttttgctttttctgactccagtgggacaagattttcctttttttatacacataattaaagtgtccattgacgtgtacagagaactaacactattttatgcagatatttttttgtagatgaaaaagcatgtacagtgttctgtttaatactcatacttgtacaaagatagttgagccagcagacattgtcagcaaattaattggcagcagacttaggaaatgaatgtgtgtggtttttaaaagaaaaaaaactaaatagcatgtattgtgtcttttgcatgattctctggatttaatttggtatcacagtctaatttttattcataagccaatttttctgcactgagcagagtcctgctacctcagtcagtatttttggtttgccacttcctgcaccctcagcctctgtcacccccagcccaccccagcctgctcggcttcttctgtaggtctgatggttctgtttacatccgtcttcacgagaggtttgcctgtctcgcttgtgcagaaaacattgctccagatccaatcgactgggtttctgtcccttcgcctagtttttaaggttatttatttaaatgtctaatgtattttattgtaacagacattgttttgccaacattgcctattcaatggcacttcacaatctagtttaaaagaaaaataaaacattttaaatggacagagaaaaataactgtcttgttcttaatggccttgaattacgtataatcagttcaaatttctgagcttctcagcttagagccttagtttcctgttctgagaagagtcctgttctgccgcatagtaggattttatttataatgtataggcacgatctgtcatgtgatatacattactcaagtttctgctggcccgttgtatgtaggttggtgtaagggcaagtgtgtgtttatgtgtgtgtatgttttgtaaaatctgtaaatagcacatgaccaaatgaacatattgtatagaaatatttttatttgactatggcactaaccaccaccaccatgactgatgaacgtttgcgcatgttcaaggtcagtcttaacggcagtgtgagtcattaacagtcctaactgtggtgttttcctccaatgccttccaacatccatcaactaacgtgagtatcttccctgtgggactggggtgctgtggcctgtgtacaggtggtgccactgatgagctggcccctgttgctagtgagctgcatggctcctgtgtccaccaggcagccactcactacacaggctaccctagtgtagacactgaccaggacagcgatccctatgagctgtgggaaggagagccttgggacctggctgacttcaggctgaaggagctgtgtcacctctagtaccaaactgagactggacacaaaccatgtcacaaggctatgggttttcagtggctgaggaagactaggaaagccagctgactccgcataggcagcttttgtcacccttcaggacatgtctcaaccctctggtgtgcagaggcctggagactgcgacctcctccctaagttgcaggagaaagtgccaggttctgagggaacctggcactgacccttccttggggaggcctctgtgtgctacagggagcagtgattctcaggaagcaggcaggttttgatggagtgggccaaacacaaaggtacagctgagttaaagaccaaatcagaatgatagcgtgctgggccctaacaccatgctgttcagtgccgtttacgaatgagtgggccctaaaggaaatggacctcatccctgagtgctgtgttgcttactgggacctgttcaaccccaacagatagactaacacttgacccatccagccacaagcaaggctgacaaaaccttcccctggcccgcatagaccaaggccaacagcacagtcccagccacaggccacctcctgcatgtcctcagccctgctctcacccagcaccctcaagaagggacagcatttattgtgtcagcatcatgctcaacccactagggcagtctagcctggaccccagccttgaactttcccggaatggcctcttcagcaaagctgtctaaaggttccaccctgcagcccactcagcaaaattcaggtggtggcctccccggagagctagcagggctactaaggctggagaaggctagccatctcacagcagctgctatcacagcaccctcaaaatagggtctcagccccaacaatggcacaggcctcaggaacatctaagatggcagcattggctcggtgcctgcagagccgcagagccaaaaagcatggttgccctttgtcgtgagctgccaaactccattaggactgacccctgcaattgggaaaccttcaaagcagagctgagcctgtagcccaggactggctgccatagagaacagggagggacaggaaggcctctcccctggtgccatgccactcactgctccacctgcctcaccctctgcatggctctcagccctgtacctgacatgccttctagtttctgcctcctggaactttggtaggaggcggcccagggcagtcaccaagccactgcttctagatgtgcctgggcagcaagcacttggaacactccgtcagaaatgctggttttgcatctagaccaaatgcagtgttctttctgtctgtccctgttgttgtgtcttaacattgctctacgtttcgaaaagctgatttcctctctctttccttttcagcaatactggagtaaccgcttcctaaaccatttgcagaaatataagggtgttcgggtgcgtgcatgtgcgttgttagcaacacatctaccagccctctgcatgactgaggttggggaaaagaaaaatagaaacagtccccaactcactgtgtgatgtggaggaaatgtgtattaccagtggggttttagctgttcaatcaaaataataacaaatgtacaatttagcataacaaatcagagagcctctccagagaagttggtttctttgctgcgagaaggaggttctgaaaccttatccaagaacagaagccatcagccaagtctccacatttctctgcaaaatgtcatagcctctctaactgtatgataattgtaatgcatgccttcagttgtaagtggccagattgctctacagtgacattgaaacatgctttctaatgggccctgtacagtttgcttatttataaattcatttaaaacactacagctgctgaatggttacaacataggcctccagtcctaacttcagttgtttaggtgtgcagccagctgttccacactgtattattgtaacttatttaatgaagtcagaagcagtagacagatgttggtgcaatacaagtattgtgtgcatttatcgtaataaagtgctcagcgtcagttcagttgctcacagcttctcacagcgcatgtttgactgtagtctgtaaatagaggtcagtttctgtgctggtaacaggtattgcacagacatgatttcaggtaaataaatctattctacgataaaccctcagcagagctgtggctgatttacaggagggtggggacgggcactgaggcctccctgggagactggttttgtagttaacctggagggaagcagaatgcgtgtcacagtgaccttcagcagaaatcaggccttttcagctcagactagaagtctacacgtgactagcctcgggagttgtgtgactgttcagatgcaaagtgactgtgacgggagacagaagtagacctgaaaggatcctgaattctcccttaaactgctattctggccttacttggcagagataagcttcaaatgagtcctgtcagctcctgtaataggacagctttttgacagcatccagggccaagatggctcagcaggtaaaggcctttcccttaagatgagtctggagtcctgggcttgactcctagaacccatgggagaaccagctccatccacaaacttgtcctctgacctccactcctgcccctttcagaataaacaactcgagttattcctaacatttcagaattacaggatcactgtccccaacacttcagctcatattcaacgaagaaatttctcagaaggaataaagaccaggctggcctggaactctgtctctgcctcccaagtgctgcgaggtgtatgtacgcaccacagccgcccagcagacatcctgttcttagcaacctttagtaacttctaagaccagatgtcaacacaattcttttaatctaataggcttgtttttcatggacatgaagtatgccaagcaggaggtctgaaggccacttgagcccttgtgcttggcagaaacacttctatatctttaggcccaatctagtgcaaatggattaaagggttttaatgtctacactttggaagagaaagtcatgagcgcaggatgctgtcctgtgtaagctgtgcgttttccatggctggtgggagcccagtgccccctggagaacaactgggtgtcacctaagtccaaagcccttcgtgacctagcaggtccactctaggcctcacagggctacagcacggtttgcagtagagaagcaaaactatcgagtgtgtagctgtaagaagcctcggagcgtgaagcaggagtcagcattgagggtcagtacagacccagcacccgtgacacagcactaggccctcaacagtgggtgtgctagtcaaggcctcaccatggagcctctcacatccttgtctttttaaatacaaggaggaaactttgcctttcttggcaagacctgaaactgagggggaggggggaatgacggaagaagacaacaatcctagccagaagacaggtgattacactccagagtcaagtaaacagatttcttgtaactgagcagagaagtaccctctaatggcattgtagggatggatatgcgctctcaccactctggaggaggttgtctatccccagactccacttttttaagtctcatgccgtggtctaaatctcaaaagctgttcctgcctcccaagtgctggaattaaaggcctgcatcatgcctagcttcagatctatttttaagggcccaacccaacaacacgctgcagttcccaaatatgtccagacaagaagaatccattttagttttttaggtagagcctcatggcccaggctgtggcccaaacagcatatagctgaacctgcccttcaactgttcctgctgcctccacctcctcccaagtgggcccgccatgcctggcttcccacttcactattacaaagactggaaataatggctgctaccaataaacaagatccagagcaggttctcagtcgttctgatgctgggacgcttttatcatagttgctcgtgtggtgaccccaaccatgaaattaatgttactgttgttcataaactgattttcctagtgtaacaaatatctgatatgcagggcagtcttaaaagactcctgtcaaagagtcattcaacacccctcatgggtcaaagtctacaggttgggaacacactgattagaatatccaaaccatggaaaaaatcgaagtgagtgatgcgcattctgcccaaaatagctccgtacagaaggctggttccacctttctggagctgtacaagatccaccagcctctacctcctgagtgctggaattaacagcatacatcaccactgcctggccaaaatctcttttaaaggaaacaaaaataaatcaattccttgtctcaaaggttgtaagcaaaggactccaagatacaggcagcagattacaaaggctgggggtttaggaggtgagaaccatcaagtcacaaattgagtgggcatggatgcattctggcttagctccaatcactagggcagatgagcaccggcaggttcctgacagaatgtccacccagcagcagggatcacgcatgctcccatccagacttcctgagaccactttccaaacggtatggggcatagcaagagacaagaccaagacaagtgcaaataatcacaggctggcactggcaggaacagaggttaaaagggcacagcaagcactgcatagcgcaaactcaccagcagtggtgaaggtggcacccctcccaagggacgctggacagtgtgggcagggaaggccacaaaacacataccaggcaggtgctacttcagccaggcaagcacctttggtcccttagaatgcttcacacctcaggccaaggccaggaaaacatctgacaaaactccaaagaagaactactgttgagtaccccaacacctcaagataatccaaaatctgaagtgtgtgggggaaaaaaaagaaaaaaaaaaaggtggccacagaaatcccggacttggtgatgggctggcattagggacagagcagcaactaaggttggtgagaagacactagcaagaattagcaggaaccatggacagctggatgcaggtgagagcatcaagcactcccttgtcacttcacccttgtgagttagaaagatggatcctttgatcagcagagaatattccagaactggcaaaagatcatgacctgtaactggaaacataacttccacacaggattcaaaaccgcacatcgtggagataaggtaaactgcagaacacagaaaaactttcacagatgggggggggggggatgaggaatccttttcaggaatgaccgtgaagccaccagaggggactttcagcaacctggaaagaatgcacaaaattaaagaactgaggtgacaaggtatttcagacagaccataataactcagttgggacaataggtggacttgaggtgacctgagacctctgtcatccaggacaaggagacaacagttcatttccggcttggacatctgtgttgctgtcccagaggagccgctgagagaacagaagcagcagtggccgtggatgcagcagcagggtagacctaggaggacctgagccagaggtttccatgtgatgtgtacactgaactctgtgatgtcactctaggaccaacgcatccctctgctcactgtttctatgaaaagccccacccccaccccagcattggctcaatgagcagctgtgctcttgacgggaaaagagagcatcagtgcgtgctcggagccccaccattgtggagagcgactgaccctgaaaattagtagcaattataaaacgtgaaggtggaaatgtccccaagtgcttgatctatgaccctgtacggcttgactttaatcctccttttctatgtacaaacgccagagtttaaaatgagggttggtggccagttgcagtggcacaagcttttaatcccagccttcgggggacagagacaggaggatctctggctctgagggcagcctggtgatctatgtggcgagttccaggacagccagggctatataggaagaccctgtctgaaaaaaaaacaaaacaaaaaaacaataaaacgacacagctgagaatctgagtatggctgctcccagagtcgcagacgtaagacacccaagggtgcatcccaggctggcctcacatttaccatgtagctgaggtggccctgactcctatttctacctcccaaatgctgagaagtccaggcctctcacctaactacagctttatttaaggaataagcactgtctggatggtggtggcacatgcctttagtcccaactcttgggaggcagaggcaggcagatctctgtgagtttgaggccagcctggtctacagagtctacatatgagatcctagctccaaaaataaattgagagaaagaaaccactgtgcatcccctgggaagtggtagctctggactcactgggagggtcctccgtggctttgagcttggaggtagcaggtccaatctgccctctaatggcacgaggggtaatggccattcttgctctctctggttcccactcaagtcctgaggcaaaaccctgctgtgtgcgagctcacagaggcagccctttgtgctgaggggttggtatgagttgttgtaaaactcagcttctgcaggccttgagtctggctaaaggcagcagcaaggagatccgagccttccccaaagcaggcctggcctacagatagaggtcaatcatgtccatgggaggctcgagcccaaaggaccagccacatgctctagcctaggtccccagggatgtgctgacactcagaacagagggccataggcatggagaacggaaggccctggcagagaccagaaaggacgaaggagcctcacatgccctcctccacagaaacatatccaggagccacccctcagcctttaggcaaggtggtctgactttagcaccaccttgggggaatgagttcttccaaggcagagctgggcacaaggaagtatcatcctgcgacctcaggcctgagaaaacagtcaccagcagctcccagcaccggtgaggaatggctgccacttcaaacagggtcctcatttgtaaccccaacctcatttgtaaccctacatacctcaagtatgtgggagctgaagagatggctcagtggttaagagcactgactgctcttctgaaggtcctgagttcaattcccagcaaccacatggtggctcacaaccatctgtaaagagacctgaccgccttcttctggagtgtctgaagacagctacaatgtacttacatgtgataaataataaaattaaaaaaaaaaaaaaaagaatgagtatgcatagggagatggtacaactggaataggacacaaaggggactggtccagcctgggctaccatattcttatagagcagacatctggccagcccgctggaaagttccaagaaggatcactccacgctcggcaacaggctgctagggatttacccaaagaagggaaagctgggagcttagagaagccgccagagggctgtttataaagacaggctctaaagatctaagctgtgggagaaccggtctcaagacgccaccaccctggccagactggctggcagcctgagcgcagccaggccgggcatgacaactgttcagaagacaaagccagggcattgagggtgagaggtgtcttgggttggaagagccacagcatgtgacctcaggggtgagctgctgccagcccagaggcccacacattaagtgtctggtaaaccctaagccaaggcaggttggagtgtcctgggacagcaagggttctagtctgtcaccggagagtgactgccaacatccacaatgagctcatggcatataccagcccacaagaatgtggccgctgggggtgggtggatatgggggacttttggtatagcattggaaatgtaaatgagttaaatacctaataaaaaatggaaaaaaaaaaaaaaaaagaatgtggccgcctcctgtcctggggccgttagatcagtgtctctgacatcacagactaggctgcagacaagcatccagcaacagcccagggccacacaggggctctgcacaccacctaacaaatgtagccaggggacagagcagcccaagagacccaggtccagcagagcctggattttcattccattctgtatgctaggcacagatggttcatttcacagactgtgttaatggtttagctgggggaatcacaagttatctctatacgtttaagggtaaaaatatccaataacttttcactgctttttacagcattttcctaggcctaggcctcgctgtgtaacagctgcccacagtactgaagcgttcccagctgcagctctccctggcccagtgagaggactgtgactcccaggtgcctgggatgagcagaaccaatgtatcacctgtcctgtgactgagtgctctcctctagtgtaacactctcaaagtgcactcaaagtggttccagttttgtgacccaaccatcccgtgtacacactcttaactagaagcctgggttgttcctacctcttgtcaacggtgaatgcaggtgtccagtccctgtctgagcttttattcctttgggcatctaccccaaaataggaatggggggtccaactgagtgttgagactttgggtccaccagaattttccacacggccacgccttttccatcctactgatacttagcaatcaccgtttcctactgatggccatatggaaggcaatctgtaaagttctggattcttcttagacttgtaggtgctgagtggtttgtaaaataaactctatcctgccaatgacgaacatttaagagtcaaggcaaaccccatgccctggccctgaccccgaagcatgctgggcacatctacagttgattcaggcatggagggagcttgatggcaaaagccagccctttgtgcccctctacctccccaagaaagtggtggcagctgacgcctcaccctctgcccctggggaaggacgtgcctgggtgggatggcaagtctgaacaagatgtttacctcagccgcctccctagagaccacggtgaggtctatgtccagtctggcctgtctgtcatcagcaaatgatgtggcccctgagaactggtctcggcagagtttgtagtgactgtgctggatttatgctggcagcttaacagtgtgacactaccggccggagatggccccaggtgagctgggtttaagctgtaaaacccagagaccacaggtgaggccagttaaggcccattttctccactcacaaaggtctacagggtggcgctccagggcctctctgggctcaggctcaagtccagtcagcttgccaacaacaggaagttgggcagagtgaaaatgctcattccgcagtccagggtcccaaacctcaaagtctgtggtgctgagaaccagggtctaagtgtgagggtagctagacagggcagaaactgaagctggttccgtgttcccaaggcaggctcagaaacaggtatgtggctaccacgggtcctgcggatggaccacacataccagaccccaacgcccagcagggactgagcagtggggagaagcccatgggaagggcggggctgtagatcccaccagtgaagattcgctgcaggcatcataccaatggtatctgttagggttttactaagaatgggcccccacaggctcgtgggggtggggtgtggttttgttttgttttcttccaagacagagtttctctgtgtagccccctggctgcctcgaactcagaaatccaccagcctctgcctcccatgtgctgggattaaaggtgtgcgccaccacggccggcccaggctcgtgtatttaatgctttagctcccggggaatggcactatttggaaggactgaatgggtgtagccttgttggaggaaacccatgctgggcccaagctcactctgcctatggatcaggatagagttcttcagaactgctggtctacacagcaagaaaaacataggataaataaatgagtcaagcctcacgaacctgcctgcgagccgcacactacctgccatgataatcatggactgaacctgactgtcagcaagcccccaattaaacacttgccatgctcacggtgtctcttcacaccaacagtggctgtgagtgtcagagcgctgtgccgggctctcgtgcttgcagagtcctaagccccagagtcagaggctgcagacagcattcagagcggctgccttcacactctaggtgggagcactgtcctcaccccaactatgacacactaaagcctcaaggtccctgtggccctcgtgcatgttaaaggacacccccactcaggttaccctggtctcctagaacaatgttcaagtggatagccacggggctcccaaaccacatggccactgtgctttcatctctgtttaaggcacactgaggggtggctggtgctgctggaatggaggggtcacactggcctaaaggctcccagtagcaatggaggacacggaggaaggggaggaatcccagcacactgaagggagagggggatccatctcgaccggtgggaattcagccagccatgaagacaggagggtggactgggttcaatttgtggctgaaggggtcttgccgtctctctcagcactgactggtcagtggggctcctggtgaggccaagccaggaaaagccccacccacatgctgcctagggagcctcagagatggcttgggacagctagcgtgcagaggctgaagctcacactggtacactttgcggagacctcgtccatttatcatgtatcttaggacaagtcttgctatgcagcccagcacatctcaactgtcatgcctctgcctctcaagtgcaggcttccagaacgtgtctccaccagacagaccaccctgtcccacttcttactgcgctgacagtgttctgattattcacaatgaatcaacctctcacattcctagcaccttgatctgcatcttgaaaggcatcacacgcgagatgcagatgcaggacggagggcgagtcgacctgctcccaggtgctgaggaataatgcaggcagatgctgaaggcatctcagtgaagagccaggctggttcatgtgacaggctcggggctcggccgcccagcacatgggagaagacagtatatttatatcaaactgtctaggcccacatggctgcctctgacaaggcgataaaaggaagagtctcaaagggtgtcatgtgccaccacactgaacagtttattaggtgagcctgtcctgtgtgtggccatcatctgctcctcagatctgcccactggggccaagtgctgctctgcagtccgtgaagcacggtacccgcatccggaccatcatgactatagggagtgtggcagggaggaccctgactcccaggaaccagattccctctggcaggaccacccaggtgcatgtgcccttaagaggatggctcagttctgtgtacccgtcataaagagaaaaaggcatcgtccactgggtacgtcagaaccatccataatggtgagtctgcagcttggaactcgctcagtcctcagcaaagcagacaggtagacaccagtcccgactactacttggaaacaggcagggagccctgctgtgagcacacttccgacagcatctgtcactctcggaacaccaggcgctgccactgtgccttcactgcatgccgaaccactgctcctggtctgcccactgggctgcctcactgtcgctgccctccaggtccccttcttccccactcccctccatgtcgtccacatcttcctcctgagtggcatccgtgggactctcctccttctccatcttctgcatcccctcgagagacttctggtcattggggtccaaactaaggaacaacaaaacagaggagaggctgagcctgccctgtttcttgggactgtcactgcgctggttcagcagtgagatgactaggtcagagatgctgcaaactgtggcgtccatggctggatccagggagtccatcagagacgaaacgggacattgttctacgttttacaatttttaaatgaaggggccggagaggtggctcagtgattaagagcatttgttgctgggttcagttcccagtacccatatggtgactcatgactgcctgtgactccagttcccaagtatctgatgccctcctctggcctctctgggcaccaggcacacacatgattcacagacatacatgcaggcaaaacactcatctacataaaatgtattttaataaacaattcatttaaaaaatggcaattaaagattctaacttcactagcactctgctggaggcagtggccagtcaggaaagagtagagggactaacaggaggcctggtgctcacagccaggcacagaacacagcccagcacatgcaggagggaaccaggatcagaacaccaaggccagcctcaggtacatgatgaatacatgcagcctgcctcaggcaagctgttcttccgggtgtgacactgtttcacattctaccatgaactgtgggtaactacagccatcagtcctgtacacaggtacacaggacagattctaagtcctgaggacagagccaggaccaaagcatcctcattagtagcaaccccacaaagcccagcgtcccagaatcctcactgatttggctcctaagaaatctttaaaagggaaaacaaggtcctggaaaggaatgctcaggcctcgcccacgccgggcaggagctccgcgccactgaagcaacttcaggatcacagcctctccctctgcccaggcagtcgggtcagcaagcgtccctcaggaaacttgctgcctggtttctcgtgccaggccatgctgcatcctgtcctatgcacagacacagtggagtctgtgacatctcttctttacccaaaccttccacaaaactctgcctacacagaggcttccaccctgtagcccggccctgcagactgcttggaggttctgagtactgagtgctcaaaagcactgcctcagctatctcctggacaagagaacggacgcacgcgacacctgatgaggacaactccttgcctaagacacactcgcaagtctcagagaatcacttctaactaagccacaccaatccctctacttattacctactgcataccaggtccagcaccaaaagcttcctactgaatacgctggatcctcgtccaaccatttatttatcttaaaaattaaatttattgggctggagacatggctcagcagttaagagtgctgactgctctcccagaggtcctgagttcaattcccagcaaccacatggtggctcacaaccatctgtaatgggatctgacgccctcttctggggtgtctgaagatagctacagtatattcatatatgaaaaaataaacaattctttaaaaattaacattaaaacttaactgtattgctattagcgcatgtgcacgcacacacgtacgtttgtctgtgtaatgtgtaagtcatggcatgcatgcgaggtcagagggaaaccgtggagtcagttctctcctgcaaccttcacaggggctctggggatccacttgggtctccagggttatgtggcaagcactattaccttctcaatctttttggtttttggtttttcgagacagaaatctctgtgtagccctggctgtcctggaactcactctgtagaccaggctggcctcgaactcagaaacctgcctgcctctgcctctgcctctcaagtgctgggattaaaggcgtgcaccaccactgcccggcacattctgaattttgatacccctaattaatgtccaatgaagaaggtatagacaaggaaactggttagtattttgaccaagatgacaggtaaaagctgtattcaaacttcagaatttaagtttttaattactatagtagacagaaacacaggaacatacttagcaatagattttaaaaagcagactgtaaaatctccactagacgtaaccctctgaagccatggggtgtgggcaagcacaggagagctgtacagtcagcctgggtgctgctcggatgtgggctggggaagaaggataactccgctaatgtgctttaggaaaatatgtcaggagtcatgaattcacaaacaccttctctcgttactattctcatcctgccttcaactgtggg

SEQ ID NO: 526 - DNA, 72713 bp, Mus musculus
cccacagttgaaggcaggatgagaatagtaacgagagaaggtgtttgtgaattcatgactcctgacatattttcctaaagcacattagcggagttatccttcttccccagcccacatccgagcagcacccaggctgactgtacagctctcctgtgcttgcccacaccccatggcttcagagggttacgtctagtggagattttacagtctgctttttaaaatctattgctaagtatgttcctgtgtttctgtctactatagtaattaaaaacttaaattctgaagtttgaatacagcttttacctgtcatcttggtcaaaatactaaccagtttccttgtctataccttcttcattggacattaattaggggtatcaaaattcagaatgtgccgggcagtggtggtgcacgcctttaatcccagcacttgagaggcagaggcagaggcaggcaggtttctgagttcgaggccagcctggtctacagagtgagttccaggacagccagggctacacagagatttctgtctcgaaaaaccaaaaaccaaaaagattgagaaggtaatagtgcttgccacataaccctggagacccaagtggatccccagagcccctgtgaaggttgcaggagagaactgactccacggtttccctctgacctcgcatgcatgccatgacttacacattacacagacaaacgtacgtgtgtgcgtgcacatgcgctaatagcaatacagttaagttttaatgttaatttttaaagaattgtttattttttcatatatgaatatactgtagctatcttcagacaccccagaagagggcgtcagatcccattacagatggttgtgagccaccatgtggttgctgggaattgaactcaggacctctgggagagcagtcagcactcttaactgctgagccatgtctccagcccaataaatttaatttttaagataaataaatggttggacgaggatccagcgtattcagtaggaagcttttggtgctggacctggtatgcagtaggtaataagtagagggattggtgtggcttagttagaagtgattctctgagacttgcgagtgtgtcttaggcaaggagttgtcctcatcaggtgtcgcgtgcgtccgttctcttgtccaggagatagctgaggcagtgcttttgagcactcagtactcagaacctccaagcagtctgcagggccgggctacagggtggaagcctctgtgtaggcagagttttgtggaaggtttgggtaaagaagagatgtcacagactccactgtgtctgtgcataggacaggatgcagcatggcctggcacgagaaaccaggcagcaagtttcctgagggacgcttgctgacccgactgcctgggcagagggagaggctgtgatcctgaagttgcttcagtggcgcggagctcctgcccggcgtgggcgaggcctgagcattcctttccaggaccttgttttcccttttaaagatttcttaggagccaaatcagtgaggattctgggacgctgggctttgtggggttgctactaatgaggatgctttggtcctggctctgtcctcaggacttagaatctgtcctgtgtacctgtgtacaggactgatggctgtagttacccacagttcatggtagaatgtgaaacagtgtcacacccggaagaacagcttgcctgaggcaggctgcatgtattcatcatgtacctgaggctggccttggtgttctgatcctggttccctcctgcatgtgctgggctgtgttctgtgcctggctgtgagcaccaggcctcctgttagtccctctactctttcctgactggccactgcctccagcagagtgctagtgaagttagaatctttaattgccattttttaaatgaattgtttattaaaatacattttatgtagatgagtgttttgcctgcatgtatgtctgtgaatcatgtgtgtgcctggtgcccagagaggccagaggagggcatcagatacttgggaactggagtcacaggcagtcatgagtcaccatatgggtactgggaactgaacccagcaacaaatgctcttaatcactgagccacctctccggccccttcatttaaaaattgtaaaacgtagaacaatgtcccgtttcgtctctgatggactccctggatccagccatggacgccacagtttgcagcatctctgacctagtcatctcactgctgaaccagcgcagtgacagtcccaagaaacagggcaggctcagcctctcctctgttttgttgttccttagtttggaccccaatgaccagaagtctctcgaggggatgcagaagatggagaaggaggagagtcccacggatgccactcaggaggaagatgtggacgacatggaggggagtggggaagaaggggacctggagggcagcgacagtgaggcagcccagtgggcagaccaggagcagtggttcggcatgcagtgaaggcacagtggcagcgcctggtgttccgagagtgacagatgctgtcggaagtgtgctcacagcagggctccctgcctgtttccaagtagtagtcgggactggtgtctacctgtctgctttgctgaggactgagcgagttccaagctgcagactcaccattatggatggttctgacgtacccagtggacgatgcctttttctctttatgacgggtacacagaactgagccatcctcttaagggcacatgcacctgggtggtcctgccagagggaatctggttcctgggagtcagggtcctccctgccacactccctatagtcatgatggtccggatgcgggtaccgtgcttcacggactgcagagcagcacttggccccagtgggcagatctgaggagcagatgatggccacacacaggacaggctcacctaataaactgttcagtgtggtggcacatgacaccctttgagactcttccttttatcgccttgtcagaggcagccatgtgggcctagacagtttgatataaatatactgtcttctcccatgtgctgggcggccgagccccgagcctgtcacatgaaccagcctggctcttcactgagatgccttcagcatctgcctgcattattcctcagcacctgggagcaggtcgactcgccctccgtcctgcatctgcatctcgcgtgtgatgcctttcaagatgcagatcaaggtgctaggaatgtgagaggttgattcattgtgaataatcagaacactgtcagcgcagtaagaagtgggacagggtggtctgtctggtggagacacgttctggaagcctgcacttgagaggcagaggcatgacagttgagatgtgctgggctgcatagcaagacttgtcctaagatacatgataaatggacgaggtctccgcaaagtgtaccagtgtgagcttcagcctctgcacgctagctgtcccaagccatctctgaggctccctaggcagcatgtgggtggggcttttcctggcttggcctcaccaggagccccactgaccagtcagtgctgagagagacggcaagaccccttcagccacaaattgaacccagtccaccctcctgtcttcatggctggctgaattcccaccggtcgagatggatccccctctcccttcagtgtgctgggattcctccccttcctccgtgtcctccattgctactgggagcctttaggccagtgtgacccctccattccagcagcaccagccacccctcagtgtgccttaaacagagatgaaagcacagtggccatgtggtttgggagccccgtggctatccacttgaacattgttctaggagaccagggtaacctgagtgggggtgtcctttaacatgcacgagggccacagggaccttgaggctttagtgtgtcatagttggggtgaggacagtgctcccacctagagtgtgaaggcagccgctctgaatgctgtctgcagcctctgactctggggcttaggactctgcaagcacgagagcccggcacagcgctctgacactcacagccactgttggtgtgaagagacaccgtgagcatggcaagtgtttaattgggggcttgctgacagtcaggttcagtccatgattatcatggcaggtagtgtgcggctcgcaggcaggttcgtgaggcttgactcatttatttatcctatgtttttcttgctgtgtagaccagcagttctgaagaactctatcctgatccataggcagagtgagcttgggcccagcatgggtttcctccaacaaggctacacccattcagtccttccaaatagtgccattccccgggagctaaagcattaaatacacgagcctgggccggccgtggtggcgcacacctttaatcccagcacatgggaggcagaggctggtggatttctgagttcgaggcagccagggggctacacagagaaactctgtcttggaagaaaacaaaacaaaaccacaccccacccccacgagcctgtgggggcccattcttagtaaaaccctaacagataccattggtatgatgcctgcagcgaatcttcactggtgggatctacagccccgcccttcccatgggcttctccccactgctcagtccctgctgggcgttggggtctggtatgtgtggtccatccgcaggacccgtggtagccacatacctgtttctgagcctgccttgggaacacggaaccagcttcagtttctgccctgtctagctaccctcacacttagaccctggttctcagcaccacagactttgaggtttgggaccctggactgcggaatgagcattttcactctgcccaacttcctgttgttggcaagctgactggacttgagcctgagcccagagaggccctggagcgccaccctgtagacctttgtgagtggagaaaatgggccttaactggcctcacctgtggtctctgggttttacagcttaaacccagctcacctggggccatctccggccggtagtgtcacactgttaagctgccagcataaatccagcacagtcactacaaactctgccgagaccagttctcaggggccacatcatttgctgatgacagacaggccagactggacatagacctcaccgtggtctctagggaggcggctgaggtaaacatcttgttcagacttgccatcccacccaggcacgtccttccccaggggcagagggtgaggcgtcagctgccaccactttcttggggaggtagaggggcacaaagggctggcttttgccatcaagctccctccatgcctgaatcaactgtagatgtgcccagcatgcttcggggtcagggccagggcatggggtttgccttgactcttaaatgttcgtcattggcaggatagagtttattttacaaaccactcagcacctacaagtctaagaagaatccagaactttacagattgccttccatatggccatcagtaggaaacggtgattgctaagtatcagtaggatggaaaaggcgtggccgtgtggaaaattctggtggacccaaagtctcaacactcagttggaccccccattcctattttggggtagatgcccaaaggaataaaagctcagacagggactggacacctgcattcaccgttgacaagaggtaggaacaacccaggcttctagttaagagtgtgtacacgggatggttgggtcacaaaactggaaccactttgagtgcactttgagagtgttacactagaggagagcactcagtcacaggacaggtgatacattggttctgctcatcccaggcacctgggagtcacagtcctctcactgggccagggagagctgcagctgggaacgcttcagtactgtgggcagctgttacacagcgaggcctaggcctaggaaaatgctgtaaaaagcagtgaaaagttattggatatttttacccttaaacgtatagagataacttgtgattcccccagctaaaccattaacacagtctgtgaaatgaaccatctgtgcctagcatacagaatggaatgaaaatccaggctctgctggacctgggtctcttgggctgctctgtcccctggctacatttgttaggtggtgtgcagagcccctgtgtggccctgggctgttgctggatgcttgtctgcagcctagtctgtgatgtcagagacactgatctaacggccccaggacaggaggcggccacattctttttttttttttttttccattttttattaggtatttaactcatttacatttccaatgctataccaaaagtcccccatatccacccacccccagcggccacattcttgtgggctggtatatgccatgagctcattgtggatgttggcagtcactctccggtgacagactagaacccttgctgtcccaggacactccaacctgccttggcttagggtttaccagacacttaatgtgtgggcctctgggctggcagcagctcacccctgaggtcacatgctgtggctcttccaacccaagacacctctcaccctcaatgccctggctttgtcttctgaacagttgtcatgcccggcctggctgcgctcaggctgccagccagtctggccagggtggtggcgtcttgagaccggttctcccacagcttagatctttagagcctgtctttataaacagccctctggcggcttctctaagctcccagctttcccttctttgggtaaatccctagcagcctgttgccgagcgtggagtgatccttcttggaactttccagcgggctggccagatgtctgctctataagaatatggtagcccaggctggaccagtcccctttgtgtcctattccagttgtaccatctccctatgcatactcattcttttttttttttttttaattttattatttatcacatgtaagtacattgtagctgtcttcagacactccagaagaaggcggtcaggtctctttacagatggttgtgagccaccatgtggttgctgggaattgaactcaggaccttcagaagagcagtcagtgctcttaaccactgagccatctcttcagctcccacatacttgaggtatgtagggttacaaatgaggttggggttacaaatgaggaccctgtttgaagtggcagccattcctcaccggtgctgggagctgctggtgactgttttctcaggcctgaggtcgcaggatgatacttccttgtgcccagctctgccttggaagaactcattcccccaaggtggtgctaaagtcagaccaccttgcctaaaggctgaggggtggctcctggatatgtttctgtggaggagggcatgtgaggctccttcgtcctttctggtctctgccagggccttccgttctccatgcctatggccctctgttctgagtgtcagcacatccctggggacctaggctagagcatgtggctggtcctttgggctcgagcctcccatggacatgattgacctctatctgtaggccaggcctgctttggggaaggctcggatctccttgctgctgcctttagccagactcaaggcctgcagaagctgagttttacaacaactcataccaacccctcagcacaaagggctgcctctgtgagctcgcacacagcagggttttgcctcaggacttgagtgggaaccagagagagcaagaatggccattacccctcgtgccattagagggcagattggacctgctacctccaagctcaaagccacggaggaccctcccagtgagtccagagctaccacttcccaggggatgcacagtggtttctttctctcaatttatttttggagctaggatctcatatgtagactctgtagaccaggctggcctcaaactcacagagatctgcctgcctctgcctcccaagagttgggactaaaggcatgtgccaccaccatccagacagtgcttattccttaaataaagctgtagttaggtgagaggcctggacttctcagcatttgggaggtagaaataggagtcagggccacctcagctacatggtaaatgtgaggccagcctgggatgcacccttgggtgtcttacgtctgcgactctgggagcagccatactcagattctcagctgtgtcgttttattgtttttttgttttgtttttttttcagacagggtcttcctatatagccctggctgtcctggaactcgccacatagatcaccaggctgccctcagagccagagatcctcctgtctctgtcccccgaaggctgggattaaaagcttgtgccactgcaactggccaccaaccctcattttaaactctggcgtttgtacatagaaaaggaggattaaagtcaagccgtacagggtcatagatcaagcacttggggacatttccaccttcacgttttataattgctactaattttcagggtcagtcgctctccacaatggtggggctccgagcacgcactgatgctctcttttcccgtcaagagcacagctgctcattgagccaatgctggggtgggggtggggcttttcatagaaacagtgagcagagggatgcgttggtcctagagtgacatcacagagttcagtgtacacatcacatggaaacctctggctcaggtcctcctaggtctaccctgctgctgcatccacggccactgctgcttctgttctctcagcggctcctctgggacagcaacacagatgtccaagccggaaatgaactgttgtctccttgtcctggatgacagaggtctcaggtcacctcaagtccacctattgtcccaactgagttattatggtctgtctgaaataccttgtcacctcagttctttaattttgtgcattctttccaggttgctgaaagtcccctctggtggcttcacggtcattcctgaaaaggattcctcatcccccccccccccatctgtgaaagtttttctgtgttctgcagtttaccttatctccacgatgtgcggttttgaatcctgtgtggaagttatgtttccagttacaggtcatgatcttttgccagttctggaatattctctgctgatcaaaggatccatctttctaactcacaagggtgaagtgacaagggagtgcttgatgctctcacctgcatccagctgtccatggttcctgctaattcttgctagtgtcttctcaccaaccttagttgctgctctgtccctaatgccagcccatcaccaagtccgggatttctgtggccacctttttttttttcttttttttcccccacacacttcagattttggattatcttgaggtgttggggtactcaacagtagttcttctttggagttttgtcagatgttttcctggccttggcctgaggtgtgaagcattctaagggaccaaaggtgcttgcctggctgaagtagcacctgcctggtatgtgttttgtggccttccctgcccacactgtccagcgtcccttgggaggggtgccaccttcaccactgctggtgagtttgcgctatgcagtgcttgctgtgcccttttaacctctgttcctgccagtgccagcctgtgattatttgcacttgtcttggtcttgtctcttgctatgccccataccgtttggaaagtggtctcaggaagtctggatgggagcatgcgtgatccctgctgctgggtggacattctgtcaggaacctgccggtgctcatctgccctagtgattggagctaagccagaatgcatccatgcccactcaatttgtgacttgatggttctcacctcctaaacccccagcctttgtaatctgctgcctgtatcttggagtcctttgcttacaacctttgagacaaggaattgatttatttttgtttcctttaaaagagattttggccaggcagtggtgatgtatgctgttaattccagcactcaggaggtagaggctggtggatcttgtacagctccagaaaggtggaaccagccttctgtacggagctattttgggcagaatgcgcatcactcacttcgattttttccatggtttggatattctaatcagtgtgttcccaacctgtagactttgacccatgaggggtgttgaatgactctttgacaggagtcttttaagactgccctgcatatcagatatttgttacactaggaaaatcagtttatgaacaacagtaacattaatttcatggttggggtcaccacacgagcaactatgataaaagcgtcccagcatcagaacgactgagaacctgctctggatcttgtttattggtagcagccattatttccagtctttgtaatagtgaagtgggaagccaggcatggcgggcccacttgggaggaggtggaggcagcaggaacagttgaagggcaggttcagctatatgctgtttgggccacagcctgggccatgaggctctacctaaaaaactaaaatggattcttcttgtctggacatatttgggaactgcagcgtgttgttgggttgggcccttaaaaatagatctgaagctaggcatgatgcaggcctttaattccagcacttgggaggcaggaacagcttttgagatttagaccacggcatgagacttaaaaaagtggagtctggggatagacaacctcctccagagtggtgagagcgcatatccatccctacaatgccattagagggtacttctctgctcagttacaagaaatctgtttacttgactctggagtgtaatcacctgtcttctggctaggattgttgtcttcttccgtcattcccccctccccctcagtttcaggtcttgccaagaaaggcaaagtttcctccttgtatttaaaaagacaaggatgtgagaggctccatggtgaggccttgactagcacacccactgttgagggcctagtgctgtgtcacgggtgctgggtctgtactgaccctcaatgctgactcctgcttcacgctccgaggcttcttacagctacacactcgatagttttgcttctctactgcaaaccgtgctgtagccctgtgaggcctagagtggacctgctaggtcacgaagggctttggacttaggtgacacccagttgttctccagggggcactgggctcccaccagccatggaaaacgcacagcttacacaggacagcatcctgcgctcatgactttctcttccaaagtgtagacattaaaaccctttaatccatttgcactagattgggcctaaagatatagaagtgtttctgccaagcacaagggctcaagtggccttcagacctcctgcttggcatacttcatgtccatgaaaaacaagcctattagattaaaagaattgtgttgacatctggtcttagaagttactaaaggttgctaagaacaggatgtctgctgggcggctgtggtgcgtacatacacctcgcagcacttgggaggcagagacagagttccaggccagcctggtctttattccttctgagaaatttcttcgttgaatatgagctgaagtgttggggacagtgatcctgtaattctgaaatgttaggaataactcgagttgtttattctgaaaggggcaggagtggaggtcagaggacaagtttgtggatggagctggttctcccatgggttctaggagtcaagcccaggactccagactcatcttaagggaaaggcctttacctgctgagccatcttggccctggatgctgtcaaaaagctgtcctattacaggagctgacaggactcatttgaagcttatctctgccaagtaaggccagaatagcagtttaagggagaattcaggatcctttcaggtctacttctgtctcccgtcacagtcactttgcatctgaacagtcacacaactcccgaggctagtcacgtgtagacttctagtctgagctgaaaaggcctgatttctgctgaaggtcactgtgacacgcattctgcttccctccaggttaactacaaaaccagtctcccagggaggcctcagtgcccgtccccaccctcctgtaaatcagccacagctctgctgagggtttatcgtagaatagatttatttacctgaaatcatgtctgtgcaatacctgttaccagcacagaaactgacctctatttacagactacagtcaaacatgcgctgtgagaagctgtgagcaactgaactgacgctgagcactttattacgataaatgcacacaatacttgtattgcaccaacatctgtctactgcttctgacttcattaaataagttacaataatacagtgtggaacagctggctgcacacctaaacaactgaagttaggactggaggcctatgttgtaaccattcagcagctgtagtgttttaaatgaatttataaataagcaaactgtacagggcccattagaaagcatgtttcaatgtcactgtagagcaatctggccacttacaactgaaggcatgcattacaattatcatacagttagagaggctatgacattttgcagagaaatgtggagacttggctgatggcttctgttcttggataaggtttcagaacctccttctcgcagcaaagaaaccaacttctctggagaggctctctgatttgttatgctaaattgtacatttgttattattttgattgaacagctaaaaccccactggtaatacacatttcctccacatcacacagtgagttggggactgtttctatttttcttttccccaacctcagtcatgcagagggctggtagatgtgttgctaacaacgcacatgcacgcacccgaacacccttatatttctgcaaatggtttaggaagcggttactccagtattgctgaaaaggaaagagagaggaaatcagcttttcgaaacgtagagcaatgttaagacacaacaacagggacagacagaaagaacactgcatttggtctagatgcaaaaccagcatttctgacggagtgttccaagtgcttgctgcccaggcacatctagaagcagtggcttggtgactgccctgggccgcctcctaccaaagttccaggaggcagaaactagaaggcatgtcaggtacagggctgagagccatgcagagggtgaggcaggtggagcagtgagtggcatggcaccaggggagaggccttcctgtccctccctgttctctatggcagccagtcctgggctacaggctcagctctgctttgaaggtttcccaattgcaggggtcagtcctaatggagtttggcagctcacgacaaagggcaaccatgctttttggctctgcggctctgcaggcaccgagccaatgctgccatcttagatgttcctgaggcctgtgccattgttggggctgagaccctattttgagggtgctgtgatagcagctgctgtgagatggctagccttctccagccttagtagccctgctagctctccggggaggccaccacctgaattttgctgagtgggctgcagggtggaacctttagacagctttgctgaagaggccattccgggaaagttcaaggctggggtccaggctagactgccctagtgggttgagcatgatgctgacacaataaatgctgtcccttcttgagggtgctgggtgagagcagggctgaggacatgcaggaggtggcctgtggctgggactgtgctgttggccttggtctatgcgggccaggggaaggttttgtcagccttgcttgtggctggatgggtcaagtgttagtctatctgttggggttgaacaggtcccagtaagcaacacagcactcagggatgaggtccatttcctttagggcccactcattcgtaaacggcactgaacagcatggtgttagggcccagcacgctatcattctgatttggtctttaactcagctgtacctttgtgtttggcccactccatcaaaacctgcctgcttcctgagaatcactgctccctgtagcacacagaggcctccccaaggaagggtcagtgccaggttccctcagaacctggcactttctcctgcaacttagggaggaggtcgcagtctccaggcctctgcacaccagagggttgagacatgtcctgaagggtgacaaaagctgcctatgcggagtcagctggctttcctagtcttcctcagccactgaaaacccatagccttgtgacatggtttgtgtccagtctcagtttggtactagaggtgacacagctccttcagcctgaagtcagccaggtcccaaggctctccttcccacagctcatagggatcgctgtcctggtcagtgtctacactagggtagcctgtgtagtgagtggctgcctggtggacacaggagccatgcagctcactagcaacaggggccagctcatcagtggcaccacctgtacacaggccacagcaccccagtcccacagggaagatactcacgttagttgatggatgttggaaggcattggaggaaaacaccacagttaggactgttaatgactcacactgccgttaagactgaccttgaacatgcgcaaacgttcatcagtcatggtggtggtggttagtgccatagtcaaataaaaatatttctatacaatatgttcatttggtcatgtgctatttacagattttacaaaacatacacacacataaacacacacttgcccttacaccaacctacatacaacgggccagcagaaacttgagtaatgtatatcacatgacagatcgtgcctatacattataaataaaatcctactatgcggcagaacaggactcttctcagaacaggaaactaaggctctaagctgagaagctcagaaatttgaactgattatacgtaattcaaggccattaagaacaagacagttatttttctctgtccatttaaaatgttttatttttcttttaaactagattgtgaagtgccattgaataggcaatgttggcaaaacaatgtctgttacaataaaatacattagacatttaaataaataaccttaaaaactaggcgaagggacagaaacccagtcgattggatctggagcaatgttttctgcacaagcgagacaggcaaacctctcgtgaagacggatgtaaacagaaccatcagacctacagaagaagccgagcaggctggggtgggctgggggtgacagaggctgagggtgcaggaagtggcaaaccaaaaatactgactgaggtagcaggactctgctcagtgcagaaaaattggcttatgaataaaaattagactgtgataccaaattaaatccagagaatcatgcaaaagacacaatacatgctatttagttttttttcttttaaaaaccacacacattcatttcctaagtctgctgccaattaatttgctgacaatgtctgctggctcaactatctttgtacaagtatgagtattaaacagaacactgtacatgctttttcatctacaaaaaaatatctgcataaaatagtgttagttctctgtacacgtcaatggacactttaattatgtgtataaaaaaaggaaaatcttgtcccactggagtcagaaaaagcaaaacaaaatctagatatgaaacctccttcaccagccaatatgttcatgtgaaaattcagcagaaatagacagttgctttaaacaataaaaaattaattgattaagttaaacatcttctgtatgtagcgctgtcagtcaagaccagaacatatcgctaaagttagtgtctgtgctgtagacccagaccaccaggggcataatgagcagcacaaacggccaggaaatgccatcggtgcatgccgacagggagcaggaagatttggtggcaggctgcacacactctttaccgggttgttccaggtagtttcgggccacaaacttgagcgtctcatccatgaggatcacaggcaaggagattttcagcaccatcagccactgggtcagattcagcggtgtgatctggaaaatgagctgagacaaacaaggctgggtcaagcttctggccctgcctgaaaggaactaccccagaccccgcccggggtccatcatgactcaccggcaaaggttccacgtagaggatcaagaagtgaagtgacatggacaagcagatggagcccacgagccagatattctcccaggggggcatcctcagcaaagactggttttcagacaagctacaggtgagaagagaagtgacctcaccagaggcaaaggcatgcgtcagtgacacacaagcaggcaagggtttagtgatgctactgcctgctgacctaactaactctaaaggcctgctttccccagtgcggggagctggaggctttggtgcagcaggcccatctcagcaggctcaaagctgctggtgatgacccaaggtagagccatttggaaacttgtgtccatcagtggcttggttagatggaacttcttgtgctccactctctagggtacaggcatagtctggattgctggtcccattcatacaccctgccgcatcaggaacccatgatggggacaacccccactgtttcctggggaacaatagcttaaaactatgtcattttttgtgagggaagagctatcagccatgattttctcataaaccctaggaccatagcctacaagatccactaacctgttgagggcattacacatctctatggttactagaacagaaagtgccattgtcattggatatggggactcaaagattgcacaatccactccatcgaagtctgggttgtcctccttacactgtaggaaatgactctgcaacaaagtccaaacattccatcagccgggagtacttcccaaatgtagatgccaattccacactgagttcaaggcccaacaccaatacggaatacagctcggcagaagccctgggtcttagagctacctgaggcaactatctgaccccaaaccacagaaaaagaccaaaggttacaagaattcactctactacacagggctttaaaaaaaagtggctaaataccagctggtagaaggagactcttggaccgccgtcagcagcgatgaaccaccatgcagcagcacccacggtggcagcgccaacataacctagaaacaaagctgcaggttaccacactggccagagcagctgactacagacagggcgtttctggtctaaaaaggaaataggcaatgtctctagagtttgtgaggaaatgttcctgctgaccccagcccacgccctgcactaggtgccacagagctaaagagcaagtataggcttcagacaacaggtggaggtcaggcccatccatcccagcagacagaacacacaaggaactgaggaaaccaagtcacaccagtctataggcaaacggaggtgaccttgttggacactaggtaactgcactgttccaggtatggccaagcagaaccctttcaaagaactgccattacaatgctggcccccacccctcagcaccagagttaggtctaaggcagaggccattcctcatcaatttcaggaaatttgcaaagctgagactggtttatccacggtcaatcacctaaccaacagcagagcacacagctaacctggaattacagtggtgcacgagggcactagtttaaaagacagggaatggaaatttttatttgcccaaagggcagctggtccacgagatactgtgaaggccagaggaactggcagccactctagattgtatgctctttaaactgaactatgacaaagaacggcattagcctctgctagtggactcttcttgtcccctagttggtaataacccattcaagtctcagcctggcgctcgcaacagggaagggctctggcatgccttggtatttgcatcactctgagcaaggggaaaatataaaaagcctgatgtctaactgttgcttctctataacccaaggaaggacaggatgcttgttcaacagaggctttcagtgggtgacctgcactgcacacagcatccttccacacaaacaacaactgtacttacagccaatagccaggtaacggaaaaagagccacccgctgatcagtggttcttttgggttccgggggggtttgttcatgatgtccaggtctggaggattgaaccccagcgcagtggcaggcagaccatctgtcaccagattgacccagagtaactggacaggaattaaagcctcaggaaacccaagggctgccgtcaggaagatactgtttccatccaagggaagaagagaaaaaactcagtgagttttggaactatggaaatagcttatctccccaagccaggagcatcagacaacatctaatctaagttcatatgaaactttattagaggaccaagacttttatgattttaaactaccattttaagaatattttctgcaccactggtcagctgcagacaagtcccatgagatttctctcctctcaagccaacaaccaaatttgtcctaacagaagcagcaatctgagaaagctcaacaccctggccccagccttgaaagatactgtttagttccagtcagacacccaccagaccacttcccccacgttggatgagatgaggtagcggatgaactgcttcatgttgttgtagatggctcgcccctcctcaacagcagccacaatggtggagaagttgtcatctgccaggaccatctcagaagcagtcttagccactgcagtccctgagcccatggcaatcccgatttcagatttcttcagagcaggagcatcattcacaccatcaccagtctgaaagggaaggtgcagttgattcagataccacccatgtggcacagctctaggcagaggcactgatgcaggaggaaacgggacagagcagtagctgtgtcaaatactttaccaagaaaatacaaaaacagccatgcaagcttaaagagtcatatcacagaaaggtagaactaaggagactggacatctgcttatattgccttataccaacactcaaaacctgagagccatttgtggtggggccacataatttaaggtcatttacacacctcagacacataatcacactaagtattgcttacaggttaagaacatgcctttttcatttggttttgtttttaggcacaagatctcactaggtagcacaggcttgcctcagtctaagtgccaggattataggcacacgtacactgttgtgtcgtgtaagtctagctaaaatcttaccatagctgtgatctcatcaaaggactgaaggaactcaacaatcttagacttgtgggaaggttcaactcgagcaaaacagcgggcatttaagcaggcatctctctgggctgaagggcttaattcatcaaactctcgccctgtaaaagcctttgatgtcacatcctcatcctgcccaaagatgccaatgcggcgacagatggccacagcggtgcctttgttgtctccagtgatcatgatgacccggatgcctgcttgccggcacagcttcacagaagaggctacttcaatcctgggaggatccagcatgcccacacagccgacgaaagtcaggttggtctaaagtgagagagccacatgagctcaaacagcttacccctacccgagtgtcctggcagctcactcttgctacaactgtgagtttgtcattttctctttctgcttgcccttggttcaaacaaggttttcctagctacagtcctgaaacctgtagtgtagcagcattctgcttccatgtgtttctatgtctggcctgtattatggaatttgagagattgaccacaggaacagaacaaagtgttaaagaatgaacactcagaggctggcagtgtcagtgccacagcaaagctgtcccttctgtttagtagcttccatccctgatataaaattctggtctaaggaagaagtggaaatgaaatctctcagccttttaccaatacttaattttttttaaatatccattagtaacttggtttccattaggctttgacaggcttgtctgaacttgttttgattattctactttgaaaccagatttactaaatccttaactatttctgttggaagcagcaatctaaacaagggtgactcctgtggctcctctggcagcagaggctggacagtggctgtgcgggtgaggtggaggtacctcgtatttgatgaagttagcagagtcttccaggtgcatctcctctctcttcagtgggttgtcatgagtggccagagccaggcaccgtagcgtgtcgctgccactgccccactcccgaatgacagacataatcttctgtttgacaccaggagtcatggggaccttggtacttccaactcggatgtgggtgcacctatcgatgacaccttctggagccccctgagaatgtgagactcagattagcaactgccctgcccgtctccctggtaggaaagcctcagtctgcacagcacttgccttcacaaacatcttgctcatggatgtccggcttggcttgtttggggtacaatagacggacattgattttctatcccgtgaaaactccagagtgaactccttcttcatcagctgctttatgacctgtggggggatcagagaggagacattttatacctgctcagatacgcattagaccttcattaaatgatagagcctgcccctgtttagatatcttcatcacactggtctttttggcagcctcaacagcggtgaacaagatagcaagcacctacacaaaagtgttctctggtttggaagtagattagaatgtaaaactaagatatactgaaggccataggggacaaaaatttgtgcaggacaaccacggaaagctttaaacattggctattgagaactgatagcacagccgggcgcggtggcactcgggaggcagaggcaggcagatatctgagttcgaggccagcctggtctacagagtgagttccaggacagccagggctgcacagagaaaccctgtctcaaacaaaacaaaacaaaacaccaaaaagcaaaagaacccaaaaaacaaaaaaatctgtgtagagagctggtgtggtgctgcatgcgcataatcctagcactgggaggccaaagcaggaggatagataccaagttcaagagttgccccagctacatagtgaatttcttaaaggcagacatgtaacacatgtcatacagtgccagttagctgactactccaatggcacagggtgtgggtccagagtgcgttctccaaaaccttgtagtcacactgttctgtcagtgagggtcactaaatgtgttctgtgggtgcagcaagagaacagtcttccgtgttacagagagcttggctatgacccaccagactctgaaccgtcaaagtattcaaaggctgcatgggagtggctagacacaaaaatggccagagattgggaatgaccatctacttcctggtaggctaggggagatcagatacccaagagagatgccacgcctggggacacagaacttcaatgagggagcagaggagcaagtgtttttttcaagcactcagtggtctcccgctgactgacactccgactaccgtatcctgtctgtacatcatttcttacctacctgagcaggataaagcttgtgcatgtcaggcaaatacattaccattgagcaacttcctcacccttacggaaggttctaagccaagcagagtgacaggtagaatcgatctgtctatagagacaataactaggtggcaaatatctgtcagcagccacaaaactgttttattcaacttcagactggctaatctcatgaagctattgcaagctgaagaggaggaagagtgtggaaagatagctgtagtatgatggtctggaggtgcacagcagcggttcctggacaggcaggattgcccatgctgatgctagcttatggctatgctcaagactcaaggtgatttgccgggcatggtggcgcacacctttaatcccagcactcgggaggcagaggcaggcagatttccgagttcaaggccagcctggtctacaaagtgagttccaggacagccagggctatacagagaaacgctgtctagatccacccccacaaagtgtaggtgattcaatattcacagctacttcctgtatcccccaccactgccccactgaatgacctttgccattaggattatgcagatcattattagattattattttataatgctctaattaagcattaaaatatccttatgtcattgttgaaagttatgagatgacccatcaactttttaactttttagctgttaggtgactgatagattgtaactgcttgaggtgtgtgtgtgtgtgtgtgtgtttgtgtgtgtgtgtgctgtgcttccttaaacacatgctgagttataattgtaatcctatagtcattagttttcagtttttaacattctctcaactgaaaattgtagcattaatttctaactctatatcaactctgtgagatgactaaatagcccaggttaggttggccatgaacttaagagcctcccaacctggggttttaagtacctgagtgcctttcctggttggccatgaaatatcctgatagtggcaacataagaggagggagtttatctgttgcaagtcacagcctatctggcaagaacttgagagaattaaccacagtacacctgcagtcaagagcaaagagctagtgtatatacactagtccttagtagccccttctaccagggtagttcagaattcttcccatttcaattaactcaagggaatcccttaaaggccaatgtagacaactcttcactgacatttcctttccagtgatggcaggctgtgtcctggtaacaagcaatgctaaccacaggcctgctgctggccttgcccatccacaaaatacacactctaaaaacaaatccatagagaacttgatagttatcaacacacttcaatatcatcagggttagctggctgactttttaaaaacatagtctgcatgattaattgatgagccttgcttcatggaacagcagcattttctattttgagtcatctgtatgcatttgaaaatactaaaagaacccccagcctcaactaaaaaataggaaagaaaaagaaaaacgggtgggtgtggtggttagggttaggaggtagaagcaggcatatttcttgagttctagacagccaagtctacagagcaacttgcaggacagcctgggctacactgagaaataaggtcttggaagaacagaacaggaaaaacaaaacaaaacaaacaaaacaaaaaaacaaaaccaaactaacaaacaagttttggtgattgttgttcaaatgttgttttccatctcagtagtcattaggttgatttctgggatacatcagaaccctcattttctagctttctttttcatttctcaaaataattatttagtgctaattttttatgacctttggtgttttgcctgaatgcatgcatgtgtgaaaatgtcagatccctgggaaacgaaccttggctggtcctctgagagagcagtcagtacttttaaccactgagctgtctctccgagacacaccattttaatttggcatgcacacctgcacctcatgtatgcttggtgcatggaaggcaggagagggcaccctctgaccgtctgacaggagaaacagacagttcttaggtgccggggtggggtgaggagggagtcaaatccaggcccttaaaacttctaaccatggagccatctccaggtccaaaatccacaactgctgacttgtctattttgttacatttaacagttataaacaaattaaccactggattcagcacaaagttataagtgatccaaaagaggttttgatggactgataggtggaggcaagagcctgactggaatggatttgagaaaacagaaatgaaacaagctgggcatggtggcgcacgcctttaatcccagcacttgggaggcagaggcaggcggatttgtgagttcgaggccagccgggtctacaaagtgagttccaggacagccagaaaccctgtctggaaaaaccaaccaactaaccaaacaaaaagaaaaaagtgagaatgaacactcaacagtttttttcacccgagttaaacaaatggggtgtcaaatgacaattagggcaagggacagctctaatgttaaaagcatacaattattttctttatgctactggagaggcacagagaaagacactgagatgcaggcaggagggctgggtattctcaggactagggatagctcccttggtagagcccttatgatacacctatgtcaaggtactaatgattgctgggctatttttgttttgttttggtccgttttttaaaatgtgatttggtcgtctgtctaatgagttctgttctacaatttgtggcaattctcctggtatttgcatcgtgagctctagaaatataggcatgagagaccatcgtacctgactgtgaccatcaggaaactaatgccgaagaacaacagttaaaccaacagtgtaatgaagaagagcagcatactgtgctgagctcaatactgaccgagttgcaggcgtttgcacgctctattttagaaagccccttcagctcagtatcaaatacattcatcttctccaccaggcacgtgagagcagtctcggtagcttctccaactttctcatacacaccctttgcctgcattgtcaaaagaagtcaatgtcagcagaatagcttgtcctccccggttcatgtgagaaaagacggtgtaaccatgagacaccaaacccagatattaagatgtttattcatttaaagtccttgaccatttcaggtcactgtttattattctaatgacctttgaaaaagaaagcaaatcaataaccccactatttaacttgtaaaaggttctcttggttatcactcttcactacaccaccaaaacaaccctttcagctccagactgtgctcgaggatacatggcaattggtgtttaaaagtacagtcctggggctggagacatggctcagcggttaagagcactggctgctcttccaaaggttctgagttcaaatcccagcgaccacgtggtggctcacaaccatctgtaatgggaggatccgttgcccttttctggtgttgtctgaagagagtgacagtgtactcacatacataaataaatcttaaaaaaaaaaaaaaagtacagtcctcaccctcactctcagaaagacttgtagctggaactctggtcctttaaagggtgcatcagtggtcagaacatcatgacaactatgtatcttagtaaaacaagctgtagtgcccagctgcaggtctgtgaagggcacctggccttttttcagccaggccacgggactagaaatcagaaataaaattccactcaccctacccttgagccagcatcagaacattacaaggagtcttacctcattataatccaaagcagagtcattacacagagcacagatggtggctaactctacaagcccgtcatactgatggcacttcactggcttatcatccttttgcctataaaaagagaaaaacatttctagatcacagctttactcaactttagttttaaaacaaacaaacaaacaaacaaacaaacaaacagaacctaaacagaagctgtatgccacaatgcggcacatatgtacagaggaggtcagaggacaaattgtggaaggtcctcctctccttcaccactaagggtcgtgagatggactcccattgctgcacacacagagaaagtgctttttacactctacctcccatttgttgaaaactagaactcactttctattccagcatggccctgaacttccgtaggcatgtgacagccccctgtccccaaggatgaaaatggagtttgggaagaacaaattggaatagactcaaaaaaaatttgaatgaccagaaattttcatcaaaacccaacagtgtaccagtaagtgaagaacaaaacaaagccttcaccagcaagtctaggcttcaaaaggtattattaattaaaaaccactaacttgagccagtcagccatctagcaacagtttcttttgtgtgagtctaagagagagcacacaagagacagtttctctcggagtccaggctggctacgatcttgtgacctgccacagtgtcactatgcacatcctgctgtttgtttattcagagcttctggggatcacagcaaggcatatcttaggtccatcactaagtcagacctctgtcaacagcaacagtttctagacccatccctcatggtctaaccagaagtcaccatagtgacagagcttactcacacttctccaattggtgcatatgtggatccagttatgctgaactcattaagggaacaagtgtcaccttctactttgtccagaatgaacatctacaaggaaacacaaaacaaaagttttatgtaagatatacacaaaagaattccttgtctacagtgaaaaatcctgtcatttcagaaggtggtttgtgctaggtggtagtggtgcaggcctttaatcatatcattcaggcggcagaagcaggtagacctctgtgtgagtttgaggccagcctgatttacaaagttccaggacatctaaagctacacagagaaaccctgcctccaaaaaacaaaaaaggaagtctgaacaatgctcaaccaggttccccctcacagcaatgctctatcaacagctcagagagccttcaacctaactgtctaaacagtgatgtagtctaagataacccaagcaaaaatagggggattcttagtcagcaaatcaccaatgattgtttttaatgctcagaattctacatcaagtagcccagagattttcattctattgttttactttaaaaacaggcataagaagaagaaactcatagttcagagtcaaaacactcaagtaaagtaggcagagctgctgtagaatacctgggcccctcttcctaaccaggctccaatcagtgtctatcagtcctggagctgcttgcttgccatcgccctctacctccttttgggagtcaggatttcactgtgtagctggcctcaaactcagagatgatgtgtgcttcttcagcttgagttttgggattaaaagtatgtgccactacatgggtgtgcgtgctcattttatagaaaaatcataggaaaaataggttcactcaagattacacaaatcactaagttaaacagcaaagcctgagttagtagcctatcttttctgtgggaaaaaaaaaaacctaccttgacctttcattgaaaatgtgaccctcaccaccacttaaaagtctattgttccagcctcaaatatgccatatgcatatgcctgtaacaattagcttctcaattcttctgttttcttctttaaatccgatagataatgtctcattcaacctgggctagcctcaaactttctgtgtagtcaagaacaatcctgacgtctgatcttgctgcctcgcctgcaggactgtgactgatcacgtgtgggtcactgtgctcagtttcagttcttactgagcacattaaaaggtttcttattttacttcaaacgacattctaacaagagaagaaagcagaaaatgccaacttataagcaagtatctgctcatatgtgtcagagagaaaccgtgtttcatttagcgtgctatggaaatggcaactgacttcagcaggaggtttaactagttgcttcctctggacacacatgtagagaaagaggatgaaacctccagttacttctttaataaaaatctataagctttacagctattctgtatttcccaaggcagtgggggattattaatttttaccacgtatttgtgtgtgtcggaactacatgcagaggtcagaggataactttgaggagcattttctctcctccaccacgtgggatgaccacccacagactgcaggcaagaatcacagagaacgccccttactcaccctgcacacggacatctggtttgtggtaagtgtgcctgtcttatctgagcagataacagaagtacaaccaagggtctccacagaaggcagacttcgaacgatagcatttttctttgccatcctacgagttccaagagctaagcaggtggtgatgacagcaggcagaccctcagggattgcggcaacagccagggccacggcaatcttaaagtagtagatggcacccctgatccaggagccaccatgaactgggtcattgaaatgcccaatgttgatgatccagactgcaatgcaaatgagggagataactttggaaagctgctccccaaactcgtctagcttctgctgtaggggtgttctctcctgttctgttgccaccatttcatcccggatcttgccgatctcagtattaactccagttgccaccaccactcccatagctttcccagcagcaatgtttgtaccctagggagaagaggaaaatgggtcatgagggcaccagcacatcccaccttaaatcctgatgtggatactgcctggactccacagagcacctgctcactccctgggacaggacggctctccacacagggaacctgcctacagatctgctctgggctcggcagtactctcacttttgtaatttcaaattctatgcagctctcagcactatggattcttttatctttgtttctcactccacttttgtcacagctaagcgtggataatcagccttgtaggctgtttcagaatttctactccagtaccactactgaggtcagtgaagtcagatgtgaaacgtgagtattctcgccctattccaccttaactggatagggcagcaatcattctcactagagcgatctacttgctgctgtggttaagtgctcctactaaccagcaaagcccgcaccttgaaatatactaagctagattgtaaataatcaaaacacatagatttctatactacttgaaaaaatttcattttcaactgaaaaaataagcacacaggagctttcttcacctcggctcacatggtaaaccatgcttgctctttccaaacacagacttcttttaaatcacagccacatgcagcagcaatgcctgcaacctataaacagttacttctcaagtgttaccaatggggtttaaacatgtttgcactaatcatttcattagatggcaactgaaatgagcatcaagtcacacatgccactattttacagtctctagtttggttcatttgctttgttgccagtgccttcagcaaatcactcccccagctatgtttctttcttttttctttttttctgacagctgacacacataccaaagaataattatctttggaataactgattatttttttacgtctggccactgagagtggccagtaaaaagaaaagactcagaactttgggatgttggtggtttgaatgaaaacgcccccatatactcataaggagtggcattattgggaacaggtggggtcttgaggctcactctctcttcccacttcctcaagatctggatgtagaactttttccagctacctctccagcaccttgtctgcctgcataccaccaggcttcctgccatgataataacagactaaacctctgaactgtaagctacccttaattttcctttataaaacattttcctttataaaagttgccatggtgatggtgtctcttcacagcaatagaaaccctaattaagacagggactatctccaaataaaagtacactcttagctgaggcccttggttcaacccccaggaaaccttacccccaacatctgataaaagtactcacagaaaagagcatgttctttttgtcttgattaacagctcgggggtcagggacagggtcagtatgcttgatgacggagacagattcacctatgcaggttatgagacaggatggttaacgctatctgcggcatagccaatcccacagcaccccattcccactgttttatcactgccaatgtgagcagttgtggtaacatatacctataatcccaacacacaggaactgaggcaagtcaagttccaagttcacggccaccgtgtgctacacatccagtttgcgggatgagcaacacagtgagacccagtcataaacaagcaagaaagttcatagccatttccaacatgggagaaagaacaaagggctcaaccgatccaaaacaggcaaactaggaaaacttagtaatggagattaatgtcagagtaatggagagaatgtcaggactacaaaaagtgtaattttaaaaataaaaagtaatgttgaaataacatcctgaaatattcctggaagagccaaagatacagtgatttgtctgacctatgtttagtatagcattcagttgggctgggaatggagttcagctgacagagtgcttacttagcatgcaaagtctggggtcgatctccggcagtatatgaagccgagagtggcggcacatgcttttatgccaactgctggacaggacagacagtaaacagagcagctcaaggttattctgagctatatatcaaatggcctacaggataagacagcctggcctacaggatatcctgcttcaaaaagccaagaggaaaaacagggacccttcaagattctgatcccttttcagttttctctcctatttctaggcatacccgaggatttcaggtatacagtccaatcatttccctaacattttatggcctaaataacttgaagctgatgttgctaaagggaattttactagttaagcagttgtataaaacaagtgtttaaagcccagctgactggattggggctggagagatggctcagctgttaatgcgctgactgctcttccagaggtcctgagttcagcaagcacatagtagctcacaaccatctgtaatgggacttgatgtcttctggtgtctgaagacagcaacagtgtgcttttatatatatgaaatagataaataaatctttaaaaaaaaggggggcttcaggtggcatggacttaccgaattatgatcagttagttacttttaaaacggaacccaaataaatattgacagcctttaaagtttatatttacttgctattcaggttagcacttaaatttaaaaaaaaaaaaatgtatgtgggctggtgagatggctcagtgggttagagcacccgactgctcttccgaaggtccagagttcaaatcccagcaaccatatggtggctcacaaccatccataacaagatctgactccctcttctggagtgtctgaagacagctacagtgtacttacatataataaataaataaatcttttaaaaaaaatgtatgtatgggggtgggaagagaaagtgttatatgtatgttttgttttgttgagacagggtttctctgtgaagccctggctgtcctgaacttgttctgtagaataggctggccttgaactcacaagagatcttcctgcctgtctccaaagtgctagtattagaagtgtagctaccatgcctggcttatcatcaatgtactgtgtggttctcttttgttccgtgtgcattgggttttgcctgcgtgtctgtctgtgagggtgctggagttgtgattgcctggtggatgctggggatcgaacccaggtcttttggaagagtggttggtgctcttaccagtgagccatgtctccagcctgccagcacttctttaaacctgtcaaccctgccagcagatatcattccaccctggatcatgataactaagaaataaagtatcttagagaaggttagggtaggatcccataaaggggtacatatagctgagagataagaggcttcaaatttgagtgattttccaatatatatataatacttacctgtaagaattgactggtcgactcttagagttgtagacttgatggatgtcaatctaatatcagcaggaactttgtcaccaactaattaagagattaaaaggggggaggggtcagttaaagtgagcaacttttatggttacctaaagatgaatgattccatatcaaacatgctttttaaaaccaaataccttgcatacaacacaatgggtaaataggtctctatttctgagcagagtgaacagattaagggtagaatatggccaatgtacactgttagcattctgtctaagctccagcacagttacctggcaacagtcaggcctaacccactataaaaggggctgcttgcaccctccctccttgctctcttgctcctttctccccatgggatcatggccggcctctacttctctactctctctctctgcctctactattctcttgactcccctctccccatactatatggttacgtggctgtccctcagggggaagggatgtcttagcatgggcccactgaggcacccctcccccatacctgactacaccttcatagaacatatcccccccttcttgatctttttgtaaacacaacatacactacaatgtagtttgtatttaaagcaagctagatgggggctgggggggggtcaggtggtagacagggcatggtccctagaactgagtggctacctatggtacccacattgtaattccaaccagaagatcaagactgcaagctctccctcaatggtgcattgaatctgaggccgaacacatacacagacacagacacacacacagaatatttctgaaatacacaggaacatccatcagaaaagcaacagagacaacaaacaaatagttccatcagttatgtcacaaaacaaatacacagcagtagaaatgctattttaccttccaagtgtcaagaaataagaaaacagacctgagttgaagctatatggtaatatgactcttacttcacaacgtctaaacttctgccagcttccataggggtgagaaagaacaaacaaggctggggggatgggttgttaattatagcttgccatgcaagcatagaaatgagagttccatgggttcagttctcagaacccatggggggtggggggacttcacaaagtctcttcccacatctcacatctcacacacaataacacaataacacaaatcacacaataacataataacacaaatcgtaaaaattaagtaaaaagctagaggtaggaggtaggtcagtgagattgtgcagtgggtagtcacttgaaggctgatctgatccccacaatagagggagagagcagactgtctcaggttgtccccagacctccaaataatgtaaaaagcaagacaaatgcagaaattaatgaaaattctctcagtgctaaagaagaaccatgtatataaagagctcatccagtattccgtgtcacagagtatgactagctaattgattatcatactttacctgtgcttctagacacggaaatcaggatacaagggaaatgaaacatggacaggacttctgttgctgtctcaaagctgcaacattctttttttttttttaaagatttatttattaatatgagtacaccattgcactcttcagacacaccagaagagggcgtcagattccattacagatggttgtgagccaccatgtggttgctgggatttgaactcaggacttctggaagagcagtcagtactcttaactgctgagccatctctccaggccaacattatacttttataaagcttaattttatgactttgctcaaaatttttgtaagcagtgaaagctgtgaccactttacacactgtggtgaaaatttcctaaggtacctgtacatcacatgggaaatcacaggagagaaccacacacacagagctgatagtgctgtaatgtttaacaaatgagcaccactgggtttccaggccacagtggagagagacatttcaccctataacctttagtaccttttaaattatctaataaataaatctcttgcataacctgaagatctttcagtcaacaacctgtttcctgggtagagttcctgtaatagccccacagggctcctagctgagcacttggtaagtataaagcaaaatgctaaaatacaccgagtaagggacaaaacccaagctctatgtacccctgagaacagcacctctgcaagagaactaatgtgcccatttagtggaactttaaagaagatgggaactggctatgctcagaagacagcctgcttagcagtgcctgggactgcctccagcctcaaagtgcaaaacttccaagcaaagtggtctagaaaatgccaaagcagccatcctatcctagaagtatgccctgcacttgttaacccttctccaaggagaatatagcgaacttttaaaaaactttcctgctgtggcggctctcaaccttctcaatgcttaatccctttagtccagttcctcatgctgtgtgtggcacccctcgaccatattttgttgcttcttcataactgtaattttactagttaggaattgtaacataaatctctgatatgaggcgaatctgacatgcaacccctgctgttttagtgcatgaaacgaccctacgcctaggaaagcaaggcagcacacaaagctagtaggtaggtccaagatctccaggggttaagatcatccttgcatttgactacagggacacacacaggtgaaggtagaattcctgctggaaatgcttatgcaaccaagagcaacattccaactgaataaaacaaaccttccactttaatgtactttgttcacggtataccaaagggagtacatccaaatgattatgacattaaaacaaaacaacaacaacaaaaagtttaagaccaggcgtgacagttgcatgcttttaataccagtactctgcaggcaaaaatggatctctgaatttcaggcaagtcaggtctaagctgtgaaaccctgtctcaacaaaccaatcactaaattacaaaaaacctgtatgtgtgggacatcccagtgtgaaggtcagaggttatctatctttcagaagtcagttgtctgttatcatgtgggtcccacggattgactcaggtcatcagaaggcagcagacacctttactgctaatccatcttagcgactctggttttgtttctgattagagcttttcatacaatatgtttgatcatgttttctcctcccagactctccctagctccccacccaccaactttatgctctttcacaaaacaaaaataaaaataaatcaccccctctccgacaaaacaatcaaatcaaacaaaaaaactaagataaaagaaatacccaaacaagacaaaataaaaattaaaaacctcacaaaaatactagttagttttgtgttggccaacttctcctgggcatgtggctgtcctggaatgtatggttctgttttttaaactaggtattctttaagacagtctcttactagtgttgaacttgtggcaatcttcttgctcagccacagtacttagtggtatgccactaccactctactatacaaagtagtatactggtatgctatactactaccattgtttctgcacgtcacaaattaatctaattccctgggccttttaacatttaacatgaaatgagtacaaggtcaactggaagtattataactctaaatggaaaaatttcaaatgttcctttgatgtccgaggtgatttatgtaataatcctatgggagctacagacaagactttttttgtccaatgaggtacagaggtgctagcaatctacagctgatgtcattcatgactctgcactataactgatgggatagacagtaactgtatttacaaacttccacctaagagagctagagagagctctcagaggttaagagttctggctgctcgtttagagagcctaggtttgattcccaacattcacatagtggctcatagctgccttgaactccaatgccaagggatcccatgccctcttctggcttctttgggaatatggtgaatagacatgagtaggcgtaccacctatacagattattaaaagatcatctaatgctgacaaggtgctcatcaggtaaagctctcatagagcaagccgaggacctgagtttaatccttggatctcatgttggaaagagaagagaaccaacttccacactctgtagcacactgagacatctcacacacacacattatacatacatcacaataaaatagaaagggcaaaatatgatgctaaacctttaaccgtaacactcgggaggcagaggcaggtggatctctgtgagtttgaggtcaacctgtttctcacaatgactttcaggatattcaagacagccatagtgaaaccctatcatcacctgccccaagggggaagggaagtggggtgtatgtctatgctcttatatatgtgtgtgcatggaggtcaaggaagaggcatcagatcccttggagctcagagtgcagatggttggaagctacccaacataggtgccagctaggactctgactttggtcctctgttagagcaggtggtgcttctaactgacaaaccatccctctaacccaatggtgttgaagattaaaccaaggccattaaggcaaatccttgctttcttgaaacaaaatctctgttcagagtctcgtttgcctccagaatgctgagattataagcctgtgcctccacatccagcaataaatgcacaagatgaaagttctgaataacacaacattagagtaaggtaaaaccaatacctaaacatacatgctaaatgaagacatttatgatagcattataaagtcaatgactcttcccctaatatgaagactgttactcattgagaaaacaatgttgattgacaccttctacaatatatatacatctggtccttctctgtcacatctttctcttctcgaccagtcgtttcccccccccccctttgccctctctgtgcctcagggctgaattgaactgctgcctcattgatctttttcttttgcataaaaggtccaactaaaacctggagctctttcatccgagggagcatttcacccctgcccaagagaaaatggtggttctatgtggttactcagtttttaagaaaacaaatgaacaaacccaacccaaagtaatatgagtgtttatagtgcttacttcatacttaatatgtatattcatatagaaaacttaaaaaactctattgacagcaggtcatctgccctacagataaggttaaaagtaaatgtgtctatttcttagagtacagggcttctgctctaagtgttgtcttcattgatcacaggggaacaggctaaatgttatactccttaacaaaaggaggagatggacagggccatcccagctggctttataatgagaccataatcatacaaagcttcaagatgttatagaggatctggggtgacagactgggaaacctagagaaagggagagctccctgtgtggccatgtgaaagcccggctacatcctgggtaaagactttccagtgtggctttatgtcacctgcacccctgttagtaacttctccaccaccaccaccccccccccccccccccgttagtaacttcttgacaattctaaataagcctaagaaactcacttgtttcccagggtgatagacactgctttagtcacccccccccccaggagaaatcctcaaaaacagagacatcagtaattctattttctcatgttgttaaaaaaggacatcagtaaacaaaatatttaaaagactgtattttaataaagaaattttaatgagaggaaaaaaatctatattgatggatgttttcagaatagaaaagtagaaatctcatgcaagttagttttgagtaatttaaggtacataaaggataaagttgagatgatatgtataatatccaagtgtctaaggtcaaagatcaacaattacaagaacttttatttaaaagtgtctggctttagtcctagacaggagtaactgaccttctgggtgtccaatacccccggaaggtctttctactgtggccagagggatgaaaaggacgactctcatccttgctccccaaagccagctaagtacagggtgtgtccagggagacctcctgtggtgagtgctaatcaaggtccacactacaaagagagccttaacaaacaggaaacttcctacttacttcctagtgcaacagttgtcaaacaaggcctttgatttatcctcacatagttggaataaccaataaaagaaagattaatggagctaaaagttactctcatgcccaaatgatccctgaggaccagatctttaaactggtcttggacagttaaaaaaaaaaaaaaaaaggtaataattttacccacctccatggtctcaaggaatgaggctgttagggtgtttaatgtgtagtccccagacactatcaggtattattactcaaccatcaggtattatttttacgacttttctcagtatgattatcttcttgagtagaagaaaagtaagttgcctataatatatagaaaatgactttggctcaatttaacactgaagttaactacctagagccaaaacaaaataacagggctggtgagttggctcagtggttaagagcaaagtgctctttcgaaggtcctgagtccaattcccagcaaccatatggtggctcacaaccatccttaatgagatctgacgccctcttctggtgtgtctgaagtcagctacagtgtacttacatattttaataaataaattttggggctggaacaagtagaggtcctgagttcaattcccatcaaccacatgatggctcacaaccatctgtacagctacagtatactcatatacataaaataaataaataaatcttaaaaaaaaaaaaagagcaaagtaacaaagccaaccctatcttcttactttctatacgttaacaattcacactccaaggaggcgaccagattacctctcaaactcccaggtttggatgcctgtgggacattactagacaatcatataaaaaggatccaatgggattttgattaaattgtcaattagatgctgacataaacagattcctcttaaaaaagtttccaggtacattttctttaaaaaaaaaaaaaaagatttattttatatatgtgagtacactgttgccactgttttgagacacaccagaagagagcatcagatccgataacagatggttgtgacccaccatgtagttgctgggaattgaactcaggacctctggaaaggcagtcagtaatcttaaccatctttccagccctagaggtgtatttttttctctctctctctcctctgagacagggtctgtctatgtagccctggctggcatcgaacctagagatccaccttcctttcctgtctgccaactgctggaatgaaaggtgtgcttgaccactataaggattggattctttctagaattccatgggtggtagatttttctgaagccatgggcctattttatagtcccgtttattgggtgagtaatttcctgtattttaaaatccttcatatattaagaatatggggtgctgttttctgtgtcactacttcttcaagcattgttgtttctgagccaaggtctccatgggccatagctgtccaaagatttggcggactctacatttgcatgttaaaactaagcgtgggccatactttctcctgcacggaaaggagtattgtttgtaattcaacttgtgctggatcatggtgacatacaaagaacttcagttaacagtttaaaagacaaaataaaaacatatatcagactcatgaataaagaggcaacacctgatgccaggtaaggtagcacaagcttttaaccccagctcttgggaggcaggtagatctccatggtgttcaaagacagtctaggctggtttacatagtgaatttcaggcagacagggctgaactgaatctatccattcattttcctctgctgacttacttcttacatcacttttcagccttttagctaagatcaagtgtaaaaatttaatacaaggcaggctaccaaggtgattcagcagctaaaatcgactgccaccaagcctgacaactggaagtctaatccctaggacccatactgtataagacagtgaactcctaacttgttctcttatcattcttgtacatatatacccccacacacacacacacatacacacatgaacatggacacagacacagaaatacaattaaaaaaacaatatggggagaatactcataaccacaggttcagattctgaaaagaactttttggaacagtctctattacattttcttgcataccagaaatactagctcccacaagatcgtctctgtggaaagacatgaaggaagtatgcccgaattagtttttataacccactatgtgctagcattctctcggctagaaagcctttgcatcatcttggccaacccatgaccttgttttaccaaggccaggaagtagagagttttacttcaggaagctcaattaatgaaagacttcctctagcttgttatgactgcttcacatcttttgctaagggtctatttggttgcacatcaggacagatctattaaggagctttaaaaaataaatctatgaaagtaaagatctgtctaatatttttcaaaggaaaaataacaattgtctttacgccacaggctcctgtgagtttcagacagggctctgcctgggaagcaggcaaggaaacactgctgatcacatccagtgatgttccctaatgggcgagtgagcgcctgagggcacgtggtagtggaaagttcttattcttgccaagggagtgctctgcaattttttcctccacattttttttcctctctttgggctgaggcaggaagaatgagagcatgtgttataaacctccttccatttgcttaacacctgacactgctcacgtgtagttcttggctctgtaagttcttagctctttcctttccataacaatactgattttcactctgaagaaaaatacaatttaaaggttagtctaccaagaatacagttaagagtcagtttttaaaagttatttttgcgataatttataaatgaatggaagttttctttaccttacaaggagatttaagtaagaatacttaaacatcttttttacttaaggtaaacataaataataatatatgcaaggaaaacagtttacgtatacatgtatgtgggtgaataaaaagtattttattttagctgggtgcagtggtgcatgcctttaatcccaagcacttggggttggggtgggctggacatgtacctcaacaggtggagttcagaaagccctgaaactgaacgttgagctatgaacatctttcacttctggaggtcaaattaatacatggaagcaggaattacaccattctatcctcacatcccagccacctccccaaatcctctacatgttctaacacaagaaaagcttaaacactgtatttttccaagtcacaatatcttagcaaaagtgacccctttcctgtggttgttgttggttttgttttttttttttttctttttaaagctgtttttttccccaaaagtcttaacctccatggcaagaatggaaagactgacactgactattagtcatgaagcgggaggagtgattacaggaaatcaggaaatgccagccccgtgtaatcaggtcaagcttcaagatcaactggtctgtcatggtctgagggtgtgtggaggtggggaacctcccatagtccttcacctctcagtgtcttatgacctgtcctcacagtgttaaagggtcttgacctcaaagcactctgcttaatatatctacactcatttttcaaaagtactttgtactttcaaaagagattcacatttatgtatacggtggtcttttgcctgtattcacgtgtacctcatgtgtgtctgttgtctgtctgcaaaggccaagaggtgtcagatcacctggaactggagttatatctgagccatcatgcgctgacagctttgtggagctgaagttacaggcagctgtgaggtgccccagctgggagcgaggttttatcctgggtcttttcaagggtagtaactactgtaactgctgggctcatctccagtccttgcttttcttaacatacaagttaacatgaggaatttaggacttgatttttaggaacaatcaatattatttctagtgttacctgaatctagataccccatccctcactatgaaacaactttacagacatgctcaatgctttccttggttgtttctctggcttttcccccccctttagtataagtttgacttttaaaaaaatttaggggacaggacatatatgtgtgtggaagcctgaggttcacatcagatgtcacccattccccactttatttactgagcatgaatcccatgctgaacccagagctcaccttaactagtgtagctagccaacctggcatagggattactttttcttacctgctgacaaaggagaggccatacattcccatgttttatgtgggtagtggtcacttaactcctatcctcatgcttgtatagcaattgctttatgcactgcaccatctctcttgttcagcacactggtttccttgttcagagatcctgagttcaaatcccagcacccacatggtggatcagaaggccctcttggggtgtggagatgtatgtgaaagtgtgtgtgtgtatacatatatatgtatagatacatatataaaaaacataactaaatctcaacttctgtaaagaaaaaactagtatctcattaaattgcttaactgtaaactgcttaaacaggataattactgcttaaaccacacttaaaattttaatgtggtctgcatgctagaacacacgtttacacttttgaagagatagataatctgagttccaggccaaccaggccaaaatagtgaatcttatcttcgaaaactaatttttcttgtatcttttatttgtgtttctttgtgtatgttcacatatatgcctgtctgaacttatatgcactatgtacatgcaggtatctatccacagaggccagttgtgaactgaactctgatattctacaaaagttgtagtcattcttaactgccatctctctagctccccacaggatcctgggacagacttttaggaacttttagaaatgtagaaactacccagctccatttgagactttaataatcaacctgcccataaagttaggttttgctctaaacaaaaccaaccaaaagtgtttggttttgtacttaaaaacagggctgtaaagatgcataactgtctcggaagtgaaagaatactatcttctcttccataggacccaggttcaatccctagtacccacatagaggctcacaaccatctgttattccagtctcaagggatctaatgtagtcttctggcttctgcaggttcctacatgcagacaaaacacccataatgcaaaataaacaacaggtgggacatggtggtgtacgcctttaatcctagcacttgggggcagaggcacctgtgagttcacaggccagcctcatcaacatagtttccagacagccaagtctatgcagagaccccttgtctggaaaaaccaataaacaaacaaacaaaaatttacctcccctccctttaaactagtggtcagctaagtgcttagattacagagatgagatgttattttaagtgattgctttagccgggcagtgacggtgcacgtctttaatcccagcactcgggaggcagaggcaggtggatttctgagtttgaggccagcctggtctacagagtgagttccaggacagccagggctatgcaaagaaaccctgtctcgaaaaaaaaaaaaccaaacaaacaaacaaacaaacaaaaacaaaaccaaccaatcaaacaaaaagtgattgctttaaaaaagggaaaaaaaaggtgttgctgtgaaacaaagctcaaaataccaaatggatttataccaaccccccaaaagtccaaaagcctgccaatttggcacagtcacacatacatgtaattctagtatataggaggctggggcaggcagaagatcttgagttcaaacctggcctggtctatacagtaaggacggacaccaacataaagaccaaagcttaatcccatgtaatgccttacttactctctgctctcatggctggtgagctcataagattagatgtttgttaaatatacaaagctaggctggctcaactatgacagcttcctaaaagaaatttaaaaaacaaaaccaaccaaacaaaaaaacgtaacaatcaagcctcatgatcacaactatccaatttatatgtatgttagattcaccaagttccttagaatctatcagagacaggaatagcagtatatacctgtatttcaggaccctgcgctcatggcttgacttgggtaattcatgaactcatgactagccagtgctataggaaactatctcaaagaaattcgtcttaactgcccaattctgtagagctgaattttctctgtcccatgtgaagcagaggaagacaatgctggttttcttaaatgagttgggttatctattacataaccttgctttgtattcaactgcctagcaaagtcacatataggtatgtgtgcatgtgtgcgtgcgtgcgtgcgtgtgtctgtgtgtgtgagagagagagacagagtctcactatgtagctctgtctgtcctagaatgcagtatgtagaccaggaagtcctcaagagatccctcatgcctctgcctcccaagggctggaacaaaaggtgtgccacctcatgtgaagataactttatattactaaatcttattactattctttaaatagtcaggtttatgaatgattcctcattattactgaattattggaaaatgctgtccctgttactgagcaattagttttcattttaggaaatataaaatattttttacagaaggcttaaggcaattttttgttgactgtgtcatttttatcacttgtataatagagctcattccagaggattcttcaggacaggagcaatttaagctctgtgctatcgtcagccctgttaccaaaacagtgttgagaacagtgcccttggggttagcaagatggctcagcaggtaagagtactgagtttaaatcccagcacccacatggtggctcacaaccatctgtaatgagatctgacgccctcttctggtgcgtctgaagacagcagtgtacttacatataataataaataaatctttgggtcagagcaagcagaggtactgagttcaattcccagaaaccacaagatggctcacaaccatctgtacagctacagtgtactcattcatatacataaaataaataaataaatcttttttttcccccgagacagggtttctccgtgtagctctggctgtcctggaactcactctgtagaccgggctggcctcgaactaagaaatccgcctgcctctgcctcccgagtgctgggattaaaggcctatgccaccacacccggctcaataaataaatccttgaataaataagcccctaggacatacatcaaagccactgccaaatcctaaattcagagactattttgctattatagcttaattcacatttgtaaaattaacagattaattcagaaaatttaataccactgatgttcccttaatgtaagattaagtatagctttactactttttgtttccattcatcagaactaatttcctggtattaaaagtaatgtagagagccgggcgtggtggtgcacgcctttaatcccagcactccggaggcagagacaggcgcatttctgagttggaggacagcctggtctacagagtgagttcctggatagccagggctacacagagaaaccctgtctcaaaataccaaaaaaaaaaaaaaaaaaaagaatgtagaaataatacatgatagtagttgttctcttactttttgcctagtcagttttatgactccatgtgttctcgatagttcaaaggtttacataagccacttgtaatatccatacaaactcttaagttattagctcataattaaaatttaattctttttttaaacttatttttacttttacacatacgtgtatctggctctcaaagcactattattgtgtctaacatcttagaataagtaaaccccggaaagtcaagcaagctgttgttagggcacagtgaaagacaaggaacagttgctagaaaagataactttctgcgaatggatcaatgtctggaattagcgatggctacagaactctgtgaacaggtcaggactttgtatgtggaagagaaggttgtatggcatgtcaaccatgtcagctaagatgctaaaaagactgacctgagccaccaacaaattgaaatgtgacttatgtacataccatatacatgtttatcatgtatatactttagaaactacagcaagtaattttcctcaactagaaaagttgaataggacatatttagagcagctggtggcttttaaccaaaattttgtatgattgtaaaatatcctctcacttaagtgcctattcctgaactcatttactatctgttctgcagagcaaatcttatgataaagatgagatttcatgttttggtcagcattacagaatactaggacatgtctagaaagaaaggagtacaagaggcttaaaaatatatctatgtaaaatctagttctctctgttctgcacctcttagaacgatcaaaatccaagcgagcacatgggcactaggccaaagctctgcccaagcttcccacgaccgatgtgcagaagtggctaactggccatgaaggattcagaaataggtcaaacgaacttagttgtgaatgtagggaatgacgactaactatattcaaattataaagttcatcttttttacttttttaatagttaacttagttttttgagtatttaacttgcctattttttaaatatttaaaaatgactttaattggggctggtgagatggctcagcggttaagagcaatgactgctcttccaaaggtctcgagttcaaatcccagcaaccacatggcgactcacaaccatccataaggagatctgatgccttcttcatgtgtctgaagacaactacagtgtacttacatataataaatgaatggataaataaataaataaatctaaaaaaaaatgactttaatctcaacacccaggaggcagacgcaggtgaatctctgagttcaaggccagcctgtctaccgagacaccctatctctaaaaacaaatgaaacaaacagcagcagcaaaacaaaaacaaaaaaaccccaacaatatatatacatatataaaaagaaaatgaaggtggctagagagatggctcagtcgttaagggcatttgttgctcttttaaaaccagggctcaattcccagcacctacatggcagctcacatctgtaactaaagtttcagtggctccaattcttcacacagacacaaacacgcagaccaagcacaggaaaaaccaacaagcaataaaattaaaaggcggaagggggaggaagggaaggaggaatacagagtggaaaggtagaagggacaaaatagagacccacttgtcacaaaattttatttttaaatatatgaaaagtgtattttaaaatatacattaaaaaaaacaaacaaacaaaacaaaacaaaaccagggctagagaaatggctcagtggataagagcactgactgatcttcaggtagaccaaagttcaaatcccagagctcacatgtcagtttactccagttccaaggaatccaatgccctcttttggattctgcaggcaccaggcatatgcacagtgcacagacagtcctgagcaggcaaataactcataggcataaaattgaaaaacaaaaaaatatctaaacacaaagagttaaatataatctgaaccttgagaaaagaacgttaaatacataatctaggaataaataaaactgaattcaactcaccagcaatttccactatatcaccaggaactatgtctttagctttaattcgttgcacactctttctgtcctgtcgatacactttgcccatttcaggctcatattccttaagagcttctattgcattttcagcatttctttcctgtataaagaaaagccaagtatggtaaactaggctgtctggtttaaatatttctagattagaaattaaaacttataatcttaatattaaaaagcatgttaagcctggcgtggtggtgcacacctttaatcccagcacttgggaggcaaaggcaggtggatttctgagtttgagaccagcctggtttacagagtgagttccaggacagccagggctacacagagaaaccctgtctcgaagaaaaaaaaattatttatttacttatttgtttattttatatatgaatgctctgtctttacagataccaggagaggtcaccagattccattacagatggttgtaagtcacccacatgggtgctgggaattgaactcaggacctctagaagagcagcaagtgctcttaaccactgagatatctctcagcccaacaattggtattttaatacaaacatttacaaacttatttatacagtaaaaagctaggctaaacaaggtgatatataccttaaatttaacccagtataggaggcagaggcaatcggtcctctgtgagtccaggcctgccagaattacctagtaaaaccctgtctcaaaaataaaataaatatgatggggcaatgcatacctgtaatccctgaagtgtgaaatttaaggcaggagaatggcgagttggaggccaccctgagctacattatgagctactgcctcaaaaacaaaacacaacacattagaatttgaggcagtgtggtctacagagtgagtttcaggacagccaagactacacagagaaaccctgtattgaagaaccaaaaaaaaaaaaaaaaaaagtatgcctggtcaccatcctgcttcaaaatttagaacatgggaagacaaggggtggggagtattatatagcaaaggccaacaaactgctctttctgcctgcacctcctaagagctggagttacagacaggtcacccaggccaggcctgtttgtaaggtatgctggatagtaatctgtgtggcccagcgatcccctgtaatcccaaagacctggaaggctcacgaagaatagtcttgagtttgcagttaacctgggctaaaatgctattaccaaaaatacataaatattttttaaaaattgaccaaagaatgtcaagcattctacttcagttttaaaagtaaggacaccagccgggcagtggtggcgcacgcctttagtcccagcacttgggaggcagaggcaggtggatttctgagttcgaggccagcctggtctacagagtgagttccaggacagccagggctacacagaggaaccctgtctcgaaaaaccaaaaaaaaaaaaccaaaaaaaaaaagtaagaagtaaggacaccaaaaacctgaagggggcgggaaaccaacttgaaaatgaatttgaaatattagtctaggtgtcttgtcaaactctaaacaaaaggcaaaacatattgacatttttgaggtagatcctatagatcaattttgaaggatgcaatttctgttctctagtaaataagctttcagcctgtgtgcaggcaaagtctgtgtaatggagaaaattaaaaacaatttgggttaagaattcttatagcttcctccgtactccacaatctgaggaaattaaaagacattttcatgaagtttttcttcaaaatcatcatgaaatataaaggttgattatatttctcacattctttggttttctgaagctttccattatcaactttctttttttgttgcccagtatagtctaaaaagatcctgcctcaaactcgtcagtgctatgcaagggacgatctatcatacccagcttctcacccacattcattctgttttctttctcattcagcttcctacttcccttatcccccccaacccccttgagacagtgtagccctggctgttctagacgttgttctgtagaccaggctggcctcaagctcagagatcaccagcctctgcttctcaagtactgggtgggattaaaggcctgcagcaccacctttgtctatgtagtttcaggacagccacggtcgtgtaaatagaccttgtcttaaaaacaaaaacaaaaacaaacaaacaatgggctggagagatggcccagtggttaagagcactgctcttcctgaggtcctgagttcaattcccagcaaccacatggtggctcacaacgatccgtaatgagatctgacgccctcttctggagtgtctaaagacagcaacagtgtacttacatgaaataaatctttaaaaaagaaaagaagactgtgtcggctgcaggagtgttctgcttacctgccacacacccacgattgcattggctaccaagataagcagaattacaaacggctctacaaaggctgtaatcgtttcttccccttcctcgaaccaagccaaaacctaaaaggaaaaattgcacatgttggacttgcttatgtgcttttacacttagctactttcataataaaaggataaaacattatgtaagttattatagaaaaaaaatcccttgtccttacatcctaaatataagacaaaatataataacagaagcaattggtttatatccttttcttaccttagttaagattactcaacaactcttattaagagttaggtttttttttttccctttacgtttgtttgttttggtggaaagaaagaatctcattcacttcataggtaacatttcaaataaatgaaacttaaaattcccgattttattatagtaaaaggtgaccaggtaaacacctatacccacactgatttagttaatgttcacaccagggcctggagagatgactcaggttaagaaccctggctgctcatccagaggaccaggtttcatccccagcagttgtctgtaactcaggtagtagagggtagagagggggagtaggtatggtcttaaagaccccttctggcctccaaagctctgaacacatgtggtatacaaataaacatgtaggcaaacacccaattaataaaaaaattcttaaaaatttacatcaattcacagacatacatggcatgaatttacagtttaaaagacaaacaaaaaagtagccaggcgtgatggtgcacacctttaatcccagcacttgggaggcagaggccagcctggtctgcaaactgaaaaaccccatctcaaaaaacaaaacaaaacaaaacaaaaaacacccaaacaagcaaacatttggagaaaaaaaattgaccatttattcaaattcaaagtagaacctaatttctaccttctcagggttagtgagggtcacatcagaatcacaagcttgttctgagacgagaaatgtattttttaaagcaatttaccacagcacctagtattgcaatacagcacttcagaaattatataaattaccctccaaataaataaaataaactgggctggggaagcggcatattatgtaaaagtgtctgctgcctagactatcagtctagaaattcaatcacacggtaacaggcaaactattccaaaaaggtatatgaatgctacacacacaccactttttttttttaaacaaaactccaatcttcctagtgccgtgaccctttaatatagttcctcatgtggtgaccaccaaccataagattattgtcattgctacttcatgactgtaattttgctttgttatgaattgtaatgtaaatacctgtgttttctggtgatcttaatgacccctgaaaaaggatcattaaacgcccccaaaggtgccatgagcataggttggacttgctgatctgaattcaaagctaactaggagggcaagtgccatggatgagtgggtaaaggcacttgctatccaagtctgatgatctgggttcaagtttcacactcacaatgcaaggatctgataaccgacttctcaaagttgtcctctgacctccatacagcaatgcccatgtcacatatgcacataagctccctcccactttccagggccaagtcctgataaatgtcagtggcaattttatcaaaaacctgccaacctgaatgactaaatctgggaggtggaccttgctttacatgggggggggggcacgtgagacgagaggctatatggcttaaaatgaaaacattttcataataaagaccttttctttttaaaaaagatttatttattatatgtaagtacactgtagctgtcttcagacactactatctgaagagggtgtcagatctcattacaaatggttgtgagccaccatgtgattgctgggatggatttgaactcaggacctttggaagagcagtcagtgctcttaaccgctgagccatctcaccaaccaagaccttttctttaaaagattacctaggagctagcaagatgactgatcaggtaaaggcacttactctacaagcttggcaagctttgattcaatccctggaacccacataaaagtgggaggaaagaaccaatcccattgagttatttgacctttgtatataccacccctccccaccacccccaaaagccatttactcctggatcttaggaggcaatggccagtggatccgagttcgaagccagcctggtctataaggtgagttccaggacataataaagagaccctgtctccaaacaaacgtgtgtgtaaacacacacacacacacacacacacacacacacacacacacacaccgtgttataagtaaaatgtgtgtgtaaacacacacacacacatcccatgttataagtaaaataaaggtaaaataatgagcccacatagcatttattctctaaggttttttaaaaaacaaaacaaaaaacccacaaataacaagttaccaaaaggtaattaaaactctaaggaggaataacattgaactagcaaagaatcctatcaaagaaaaagtatacaggctctgacacatgtcaattaccattgacaagtagggcaagaggaaaccagaatgaatgtaataaacacgactgcaagctttcaacagggcattcctagtattaaggccaggatctccgccaaaatgaaaacttctttaggaagttataaattttgataggtgcaggatcacagctgctgatacagcccttccaaacatttgccaaggagaacaaatcagagtaagaaatttaattagctcttaaagaagaaaaattgctcaacttcatgagtgacagggccttttccaaaaggtcagtgaggcattagtgactctaagataagcttcacaccttgttaaagtgggtatgaatttccttcttggcagccaatcctgaggacaacttaggccaccgtcccttaccagctggagtgaaggaatagggtgagcagtgtcagaattactagaggaacacaaacctttagcagtcaagagatgtacattgttctcatgcctaatagttatcaaatgcaagaatcctaatttaaccagtacagtaaccttgccttccatgtgtcctgttgaatagaaaacacaggctacccacactcaaaggctctacagatatactaattattgctgggtgagaaactagtggccaaatctgctctaagaatggcattcaaacctatttaaagtttaaggagcatccattcagagctgctaagatagtgcagtacctagagacagagaccttgcttaacatatgccaggccctgagtcagtctccagtacaagaggtgacaggggtttccacagcagtttcttgaatactttattaaaacaaaaacaaaactgaggttgaagagacagctcagtgactaagagccccttgctgttcttccagggctccagctcagcttgtaattccagcttcaagggaccaggagtcctcttcctgctcccagaggtccacacacatgtgacatatagtcacacaaacatgcacagagatgcaaataacgtaaaaggttcttaaagatagtctattgtaaaataataaatagcccagaaactcaaatcctacatctcaaattgaagatcaatcacattttactgacaaaagcaaatatatgctcagattgtgttttttggtgtctcatggtttgctctattgataaaaaaaatcctatcaggttataaagatgggaaaacagtcctgacagatgactgatgggagaaggtgtaaggagaactacacagatgctctcttagggtttggtcagtttagttataactatgggttttcctaagttaaacaaaatagatttacacaaaaggggaaatatatctagaaaaaaattctttgagactacattgaacatcagggattctctttatactgccttcgtttatagctgcatccctaggggctcagaagatgctctggtgaaccgacgatgctcagtgtgtaatacctcagtgtgtaataccgacaagtgggagacaatgaaacaagtgctcacagagctaagtaaaaagccccaagccagagtctgtgagtaaagaaggcaaccaacgctccaccaataactgaaggaaaggaacaaagtgtagttctaggaaaagacagggttccctcttctctctcaactctgtattgttacagtaacagtgcctttcccctgaattcaaaggttcaaacttgccagctccactctaagccatcccattttaagctgagcagtgtaggatggagatctttctactgacattcatttatagggcaatctctgcattagtgtataacttagtggtagaacactttcctaaaatgtgtaaaggtcttgggttctatccaaacacgcaagaaatggcactatggcactaataatgcccataatttttttaagtttgtgtgtgtgccggagaatatgtatatgcacatcacgtgtgccagtgtctacagaatccaaaaaggtgtcaaaccaccccagaattggtgttacagatggcttgagccgcctgataaaggttctgggaactaaatccacatcttctacaagtacagcaagtgcagccactaagccgtctctccagccctctctagcctgttgttgctggacaggctgacctccaacttgaatcttcctacattagctttttcaagactggtattacaagtgtctgtcaccacacttaacctggcactactgacttctaacaggaatactgaataaagcaaattttgttctaacacaaaaagggccgtgttctgctagacatgggagagagacacatcacagtatgacaggattgtggttatccccatagtagggaaagtgaggaaaaacattaatgcttcatcttcaaaccaccttttaaattgtatttttaaaaaattaaaaaatttcaaccaccataaatgcactatcaattgcttcctgaagatcattgaaaccagcaaagtaaaactagatagcatattttatcaatgtctcaaaatcctagaagcaaattcattcctatatttaaggtactgaagatacatacgacccagtagtggcaagaggatctcttacgttcaaggccaacatagtctatatagtcctggtctccaggatagccaaaactacaaagacagtccctgtctcaaaaacacaacaaaaaagtattttaaaatcaacctgagtagtgtaaagaaacctgtacagactctcatcatcagtaccccactactttctagaccgatgagctaatgccaacatggccctactgattctcaccactccttcagatctttcctcaaaggtcatcttgtgaggttacacaaccagccattaaaagcctgcacgctcctattccctacagccaattcctctatcacagcccattcgctttactctctcaaaagtaccattccaggcaacagaccctgttccctgatatccccagtgtgtgtgtcaggtgttcaactgggggagaggaggaggaggagggagcaggcattccagttaggcagaatacttaaagttactaatctaagagaaggaaacccagtgaaacaaaacaaaaacagtgaatggtgtcaaactaacccacgtgcagagggagatgcattttgcagagatagtcttatgtactgcaggctaacctcaaactcattgtatactcaaggatggccttgaactcctaactcacctacttagctatcaaacactaattacaattatagcatgcactaccatatttgaattgacctttttaaaagaaacaattttggtggatactaaaaattaaactgtccccatgggccaccagtgtaaaacattaatgcaggtttttttttttttttttttttggccagagcaaaacattaactgtagttaacagtttactaatctgatatttgaaataaatcattaatatctttctaacctgaggagaatctgatgatttatgagaactgcctgttcacttctacaaagaacctgcgtatacaaccgtgatattcctgttatgccagtaagaatacactgactaccacaacaaataagtcagtgttcttatttggaagctataaaaataaataagctgaagttcgtggcacaagcctgcaatcctggcgtctaaaaggctaagtaaggcaagagaaacaagtaagactgggctgtacatagtgagcttgagactagtctaagatacagtaagatgctggtggtgcatgtctttaatcccagcacttgggaagcagaggaagtcagtctggtctacagagtgagttcaaggacaaccaagactacacagagaaaccctgtctcaaaaaacaaacacaaaatcaaaacaaaacaaaagggactgaaagatggctaggcaggcagtatttactatatgtttaagcccccgagtttaaacctcaggtacttgcataaaggccagcaagccatggcagtctggctgtaattgcagcattcaggaggcagaggcaagctggctacctaaactagctgaatcagcgagctctgggtttaatccagcaaccctgcctcagtattttagatgagaattattaagcaaggcacctgatgtcaacttctggcctctgcacacacattcacacacaagtacaccacatacctgaacaagtacacccatacattgcacatacatattatataggcagtaacagaaataaaaagaaaataaggaaagaacagacaagtaccatatagcactaccaaccctccatgaagaccatcaggaaaacccatcttttagagcacaatttttctcttttccatctttgtagcttttaagagcagtcttattccagcccaggctgcacgggtgcctcgccttcctgaactacttcttttgaagttaagcaaccttggagtttatctttaaaggttttaatacagatttaagcatggacgctagaagtcaggggtggtataggcttcagagcaacctctcaagagtctcttaatctacccacaatcttgatcaaataaaccaaagcaaatgaaatgaattctagaaaaagcacttcctaaacacttattcttttccatttaacaactcatatcataaaaatgtagcagttcatttcctgaacaagaattccaagtagttattgaaaatgaacttatatttcaactaccaacaggcaatgtcttctctatcacaaaaactgttaagcacttcaaatttgaaaattagaataaattcctaattactccaaagtaaaatttatctataatcattaattctgcttgataaaaagtcaaactgtccacaaacaatttgaaaccttctgaaatccaatagaaaataacttggcacatatttcacttgttcacttcacatgttcacttggcacatttctaaaactgcttcaaataatatgaaagggaccagtaagaatgcattttgcctacagcttgtatatatcatctagttaatttctaattctaagtccttgatggccttagtgaatggcaccatttaatgcgaaagcagagacttccagaatgatgtagcctgcataaatacaaaccttaaacaacccccacatatataacttattttagcacatggcaacacgctcaaactataatcaactccatttatcttgtttacaaatgaaacaaccacctattggacaaaatttttaaaaattaatcacaaaaagatattatatataagaagtacagagtaaataactcagcagtatgctgaatggtctcctatgggaatctaataaattttattcagtgaaaaccacaggtgaaattcttacgaaatgagctagcgagtaaggggtacacaacacgtagatgacaaaccaaagtttcaggagaaaattcatgtatacaactgctcctaaaagtcccctttgctgccaattaactattattttaaaaatagctaaaaaattaatctttcctttacctgaattcagtaagttctctaaacaatcctctaagctaatgttttcatagaggccatgaccacagaacccctgggtcagacttaaacgtgtgaatacataattgaaaccatacagttatcagttttgtgaaacctaagacaagtactgtatgatttttcacttcctatcacagtataagaatacaatgttctaagaataaaaattggcgtgtgttatgaagattaagaacatctgcataccattatcaccatttaaaagaaactataaggtccactgcccaggaaaaaaaaatcctggagtaaaatgttaataacctagaactacccttgccgtccccattagcttttcttaggcaggtctctctctgcatttctctagtttcttagcaaccacactggctcaagcacatacagaacaagaaagaaagaaagaaaaaaaaacaaacaaaaaccccaccttcacctttattccctctttaatatttagaaccaagaatactgaactttgctctcttactctaggaatcactcaagacaggggtccaggttagatgccaccctagaggtcagtgaccaaatttggtcaacagtggtgccatcactgccgtcatcattcttgtcactgtcaggaacaactgtcaccttgccaccaccaggaaggcaaagcaactggaatattccttttgtacgatctatttacagagtgcccaacatcatcgtagtgtgatcttacaacatgataacaaatggaagaaccccaacagaaaaggacttagagtgaggaactttctgatactaaaaactggtgagacacaagaattccagagaccctgcgcagtcaggggtcacctctcactgcactgtaacctaagcaaaacagcttctatcattttcccccctctaattcttgagttattttgtttgtttgtttttaaacacggaaactcaatggtaattatttattttctggtgtcccaacgaaattctttcaacttttatggggagacaaaataattttttaaatacttacgaaagatatacatgctgccagcagtaaaattctaactagtaagtcttcaaactgctcaatcacaagttccagcaaggtttttcctgttagaaaaggaaaggaaaaaaaaaaaaaaaaaaaacaaaccatttgtttcaattgtccacatcaatcagcctgcacacatcatctctccaaaataacatgttaatattatttaccttcttcagccggcaattctagaaggccgaaattcgacagcaacgtgtcaggaggaaagcagaaagaaaaatgaagatattgtattagcgcttttattaaaaactgctaaattcaccaccatcgttgtctgaatggcggatataggtgtatgaacgtacaacaatctgtctccactttgataccccgagaaaattattcagccctggtaatcagtggcctcggaactgcccgtaagccctctccggcctccaggaccatgcagtcatttcagctgggtcatcacttctgccagatgtgcaactttggggagcacaagaaacggtccgagggtttctcaacaacatcgacgcctcataaatccgcgggggactcagcccagccgcaggaacctcctccctccttcccactccctctcccccccccccaatccgactcgctgagcgccggccgggaaggtcaccggctcgagacccctagaggtcggcgatggcccagacccgcgcgtggaccgcccggcctctcgcagccgtcgggcgccgcgccgagccaagccccacgaggtggagccgggtcagccatcttccttggcgctcgggcccgcgccgcgccgctgcagccccggcgccccgcacctaccgttggagccccatctctccttgagcttcttgacctgctccaagctcagccccgtgctctcgttgaccccgaagtggcccagcacctcctccacggtctttgtgtgagcgttctccatggctgcgggggccccggccggcctcgcctcgcgtccccgcggcctcctcgcctaccgcctcgcactccggccgcgggctcgtgccaccgcgggcgcccgggcgcggacagctgtcccctcctttttcttctcctcctcctcctccgcggcggcggcggccgcttccgcctgaccggggcgctgaatcacccgagccccctcccccagaaaccgccgcacgcggcccggcctcgccgagcccgcccgagggactgcgagcctcccgccccgccgcgagtgtgggtcgcttcagcagctgccagccggccgcgggcagcgcaggccccgggcgctgcgccgaggagacggggcgcagatgaggagcggcgccgggccgagccctcggcgccgggaaccgcgaggcaggcgacgggagaggagctgcgcggcgcgccggcccgagcccctcagctctgcacccccgacagcggcggcggagggaactgcggcggaggagacgggaggtggcggcgtcggggacggctccgcggaggctgctctaatagcatttatccgccgctgcctcccctctcgccgccgccgcggcatgtggacgccgctcattggccgagagagcccccagcgcggcgcgggcggcgcggccccgccccctcctccggcgccctcccgcgcgcgcgcaccgcgcgcccacgccgccagcaggccccgcctcctcccgcgcgccgccccccaggaacccggatcgaggccgcgcgcggcgcctgtgcgcgcgcacggggccagggccacctctgcgtccacgctgtgctcgatgcgctgcggccaccggcgcgggcggagggtgagcctgacttttccggggccacggcttttcccgtatcgaccgcgcgcggggatagagcgcggagttcacgggtgggcgctctgtgctggttgccctgccgctgaggttggggactggctgggaccgcgcattggcagggaggctcgggaacgcaggggggccgaggcgcgctcgcactggtgtccttggcttgcctccgcgtcctgggcagcgcgagccgtgctctgcatcctaatgtctccttcagagcccccctcagcaaccaaggggaggaattccgcagttcccttcccacacagccaaaagcgctcatctgtcgcctcgggaacaccgcatcccacacccccagccgaaagcctcatctccatcgcacgccaacaccagcccttccttcccctgcgggttctgtgccccgacagggaatcccactcttgggggaggaaggaggaagttttatttcgtttttagtagctcacacagcctttgacacacgtctgcatagaagtcacaggttatgctgtagcagctatgctaggtggcttggctttggcttccaaatgatggctgctatataagacttccacttcccccaatgcgagagaaggagccttcaatcccaaatctattcttaaaccacagatcatctgttgtttctgtgaggtctgtacagagcctagcatgcaaggtaattttgccaatataaagaggctatacggagcccgcctgtgatcccacgaacagaagtggaagccacgggatcaagagttcaaggtcatggacagacactgaaggagtttaggagcagtcttccacgttggaccttgtctaaaacatacaaaataaatttaaaaagcagaggaatgtgggaagccatacttaacagggaggaggccctttgcattgaatttgcaaatatcttcacaaaatgcggcttcatgaagggcatagattgcaaaataaagcatttcatcttcttgagtgtttagcaacgccaccccccccccccaatcacttgagacgtcccacaaggctccgcctcaagacttaagatagattccttcagcagatgcaaatcatggtgctttacccgactgaaaaaaaaaatcaagtacgtcacttcatttaattatttccaaggagtggaggctggcacgcagttctgattgatacttggaacaggaccaacagaaccctacacgaaacaaacaaacaaaaattctagtgtatagcaatgcactccctagaagcaaggtggaaactggttaggtcacagcctcttctggaggatcaggtgactgcctgcgaggtggggggtgagagggtgggagggatggagagctggtgggtctccctcctagctggattccagttctgtcgtacctacagcaaggggcactgagagtaggaaggtcatgacctctcttagtttgtctgtgatgctcactgggtttggcttttgttctgtagtcccctccttcaggggctggaggtgcaccctacaacacgggttcccagtttttccctcaggccatcttcctccttgtccggtcccctcctgaaagatgtttggtggttttttttgttttgtttttccagagctgaggaccgaacccagggccttgagcttgctaggcaagctctctaccactgagctaaatccccgagtcccccccaccccccggaaagatgctttattatctaaagcagctcccctccccaggatgcctactatcacattattcaagggtctctgctgccctagcacttttctatggaaaatacactgtagattttgtttagctgctcggtgcctgcctcctagcatcttgtaagggcatccagacttgagaatgaagcttgtctgtctggtccatactcagtacaaagcacagtccccaacatctgctcatcatttattgagtgcctacagtttaaatgcatgaaaccaatgagagccccaccctcctcaacccatcagttacttgggaagggctctgccagcactaaggcctcagcaaacgtctgctcagctccagtgtactaatttttccattcatcaataagctggatttattttggcctctggaccacttacctatgagaagaatggctgtgaagcttaggtttaaaccaaaaagaagggctggagagatggctcagcggttaagagcactgactgctcctctgaaggtcctgagttcaagtcccaggaaccacatggtggctcacaaccacgcgtaatgagatctgacaccctcttctggtgcatctgaagacagctacggtgtacttacatataataataaataaataaatcttaaacaaaacaaaaagaaggcaaaactgccctcccagaaaagacaatgcctatagtctcagagatcctgggactatattccattgcccttctggaatgttctctgcaaagcattttctactgaaggttggactgctctctgaaacattaatatgctttctagctgggcacctctttgcttagaggttggcaaaactgatcatgaacccaagactcccagaagcagaatccatggtcccttttatgtagaaataaagttgggagaaacaaagggttggtctcactttaaaagaaggaggaggaagaggaggaagaggagaaggagaagaagaagaagaagaagaagaagaagaggaagaggaagaggaagaggaagaggaagaggaagaggaagaagaagaagaagaagaagacaacgacgacgatgacgacggcgtcatgatgtagtcatgcacacctgtaaccccatcgctcaggaggcagaggcaggtgaggatgagctttaggctaacctggtctacatagtgaattccaggccagcttagtgagaacctgccttaaaaaaaaaaaaaaaaaaagcaaactggggctcagtctgttttctgtgcaatgctctactctgctccttgtttgcaaggctttaataagaaaggttaccgtcttccagcaaggctcataaccacatacttaatcacttgaggacaggaagagaagggaaagacacagcatgcaatgcagaaagatgaagtgtgatcaaagaccttcagaggcacggataaaagaggacattagctaacaaaaagcaggttagtttaaaaagctattccgatagaaaagccaggaggtgacttgcaaaagaggccttggccaggtctcagccctctgcaggcctcctgggaggtgatgggggccacaagaggcagcctgctccatatttggacagctccaatcattaaagcagccccattttgggctatgtccaccttttcctagctacatccgttcttatttaactctccgaaaccaccttgaacaaacttaaatccctctttgtgtgattccttttgagtatttccagatctttatcccactaacgtgtcctttcttcactaaaaagagcagctgggcactgagctgttctcctatagcccgagtctcagtccctcgacctctctggacacgcccagtactgagcatacaagtctgagcctgctgggcagtggtggcgcatgcctttaatcccaggactcaggaggcagaggcaggcggatttctgagtttgaggccagcctggtctacagagtgagttccaggacagccagggctacacagagaaactctgtccttccatttacacagtactagcagtgaactcaaatcaagtcctttgcgtactaatcatagccccgttaaagctatttatggtatacttagcttgttgatttttctgtcccaggcactgagccctgctataattgaatgttttttgtgcttattataatcttatcatcaagcagtctttttaaaaagattttttttaatgggaatgaatgttctgctcacatatatgcctaggtaccactgtggaggccagaaggcagcatcagatcctttagaactggagttacagatgattgtgagcagccatgcgggtgctgagactagaacctgggtcctttggaaaagcagccagtgttcttaaccactgaagcatctttccagccccaagatttatttagttttaactctgtgtttgtgttgtgtatctgtttgggagtatgtgcacatgagtgcaggtacctaaagaggccaggagagggcgctagatccccctgaactggagttacagcttgtgaatcatccaacatggggactggaagaagaactaaagtcctctgcaagacattgtttctctctctcgtttaaaaaaatttttagacttgtgctcactctggcagcacatataccaaagggacacagagaaaattagcatggcccccatgcaagggggatatgcaaatttgtgaagcattccactttgaaaatgatagtttcaggttatattttattttcttatgtttggttgctatttcttagaagcctgttcttttctaacaagagacagaaagggagtggatctggagggcaggagaattgcaactggaaggggtggtgggagagaaaactataattaggatataatgtatgaaaaaaaaatctattctcaataaaaggaaaaacgaaaaaaaagatttattttatgtgtatgagtatcttgtcttttatatgtgtttttagggttttactgctatgaagagacaacatgaccaaagcaactctttttttttttttttcttgttttttggtttttttgtttttttttttttttttttttttttggtttttcgagacagggtttttctgtgtagccctggctgtcctggaactcactttgtagaccaggctggcctcgaactcagaatccgcctgcctctgcctcccaagtgctgggattaaaggcgtgcgccaccactgctcggctcaaagcaactcttagaaaggacaacatttacttggggatggcttacagtttcagagattatcatcatggtgggaagcatggcaacatgcaggtagacatgtgctggagaaggggctgagagttctgtatcttgatcctcaagcaacagaaaggggactgtgtgtcacactgggtatagcttgagcataagagacctcaaggcccaccccctcttcctccagcaaagccacacctactccagcaaggccacacctccagataatgccactccctacaggccaagtattcaaacaagtgagtctatggggccatacctagacaaatcaccacactacatatgtacattatatatatgtatatatatatgtgtgtgtgtgtataatatatatgtgtgtgtgtgtgtataatatatatatttgtgtgtgtgtatatatatataatatattatatgcctagtgcccacagagggcaaaacatgctcctaactgttcagtgacctctccaaccctaaacagtgttctagagatgcatctcagatttgatttacacacaatttaacaaacagaatgactatatcactatccaacaggttttttagctactcattccagattaaaaataactaacgaggggctggaaagatggctcagtggctaagaatactaagtgctcttccagagatcccgagttcaaacccccagtaccgtgggcagctcacaactaagaacagacaccatgaccaaggcaactcttataaaggacaatatttaattggggctggctcacagtttcagaggttcagtctattatcatcatggcgggaagcatggcaccatacaggtagacatggtgctggagaaggagctgagagttttacatcttgatccaaaggcagccaggaagagacgaggaaaaagaggaggaggaggaggaggaggaggaggaggaggaggaggaggaggaggaggaggaggaggttctcttccgaaaatgggcagagcttgagcactaggagccttcaagctccacctacacagtgacacacatactccaacaaggccacacctcctaatagtgccacttccaatattcaaacctccatagcatataaaagttaaattaagagctggacagtcgtggcgcacgcctttaatcccagcacttgggaggcagaggcaggtggatttctgagttcgaggccagcctggtctacagagtgagttccaggacagccagggctacaaagagaaactctgtcttgaacccccccacccccacaaaaaagttaaattaaaaaaaaaaaaaagctaatcaactgaatgaatcttgaccagaagttccaaagtcaagaaagtaaggatctttaagggtgttcctgcctctttattccctgatagtctgtcagatattgtggatcgtctgtcgcccttccttggttgatgtaacttgaaggtcatgtactatgagaaatgcccatttaagtgccaggaccaaacttggcatcatgaaatgcttacactgagaggccagaaggagccaagacctctgacaggatcccatctgccacctctcgcttctcgggctgtgtgcttgttgagtgatacgatggctggggtgggggtgggggggcacagtattgagatactggctggatgcaaagcccaggtccttctgccccaggcctcctgagtgctaggtttgacagtgtgcactgccattctccgctgtccatgagaatttaacgggagagctgtgctcaccagtccttgtccacaacgggctccagaccgccactctgtcaggctttgtgtggagacacgttcactcaagcatgccacatatgacatgtgccactgatcacacactagtcctttgtgaccaccgttgccgactcccactcctccccgagtgcccctcttcccgtgtataactaagtgtctttttcatggacgagtgttggaaaccccagctcttagctgatgcttatgaacgtgagacttcctgggagtccagactgacaatggctgacccaggcaaagtcacctccacctcccggctgtcccaggtggtggcagatgcggtttctagagactcctagtctgtaactcactagtttagcaaagtgatctatttatttactcacttatttttgagacgggatctcccaaggtagccctagctatcctggaactcactgtgtagactgggctagcctcagctcacagagcttcaccctcatagtagtaggtactcaatgccaacacactaactaagcctcattttcaagcctctctccctccttgactctgaatcaaggcccaggactggccattcttccccatcttcaaccctttcgacattgctttaactccacccacggacacatgacacacacatttccacgtccagactgacaagctcagctgccagcctgcgtctccacccatccaagccacgggcccccgtgtgagggtgacaagggtgagtgagaggtcatgtcctttagaagagggagccataaataatacagaatatccagagccaagaagttcagtctcctcgtggcagaaggaataataaataggcatagtcacatgtgaataataatatggcaatgtcacccacccactgtcacctctcttctgacgacaaattataaggcccaggagaccaggggtctgcaggtaataacaagtggccagattaaacgggtgataactgttgtctctgagaccctttaaccctctcctgttggtgtccccagcagccagcacagcgcccagcgggccacaggtaccagcacatatccaactaattaattaataaaaccctctttgcagctgctgctggggggggggtggtggtgtgtgtggggtgtgcagggtggaccaaagcattgccatcttcacgaagaaagaaaaaaagaaaagagacagaaagccatagagcagtgcaaaagcaaagaattatgggatggctttcaaagctgtggctcccaacggggcaaaacgcactttaaatatagcaacaattcctgcctccattggcttgctctttgatttttgtgttaacatttctgaagtttctttcctctgtcctccttgcacaacccccccccccccaggtatcccaaggtgcttagatcttaaatgtttcaattctttaagtgcagagaggattcagtctcctagcccaacagaaaataaggaacacactctcgctggtgaatgacggcgaggctctccgaggtaggctggaggctccaggggccctgctaattgccaaggtcccgctccccagcggggatagcaatagtgaacaggtagagtttcaggctggcaggaacccaaggacagatagagcaagcgacagatagggttgccgtggacagtttcctagaacaggatctttgttcccaaggttgaccagctggttcccttgacgtcccacaatagctgaaagggtgactggtagagtcgtgagcacgtttaggtgtctattgtgatccccgttctggtcacccgatagctctccgcaaatcccaggggtctggccgctggcccgagtcaccttgtgattcctccttttggcgagggggaaggaaggggaacgctgtgtatcccgagagaagtgtgtctgacatgcctgagccgttccatctgggtgcctgcatcataggctccatctggctcaggcagacctcatgagctgaggcacggcagatcccagcaaaccagcagcctcaacccttccctaacctgcttcttctacttcatctcccctggacaggaagacccttgcagactcctccaccccccacccccacccccgggccctgccttcttttctaccatacccttcacctgtgggtctgggtatccactttggggtctgggattctctggtctaggatcccttctgcagaggggcaggcctctagagaaagcgtagggtaatttgggattttgggttatgatataggtacttcgccaactgagctgcctcaaaagcctacttcctgcccgtgaccttctcgtacgacccagtctggggcctgatttgtagacagatacccctataggaggccctctcctgtgcctcacatgctggagccccgagacatacaacggtcccatttccttggctgctttccagcacaggcgaaggcagaacctctcaccctttccccctgaggtcctctcaggtgggtcctgggagccctggtgggggctgcacacagccccagcaagctctcccgagggttggccccgggatgtttgcaaagattggaagtctctctcccatgactcatcagaggagagcagaaccctccttcttcctggaaggcagcaaacgcaaggccaacccccacccccacctccaaaaagtaatcagccttcacttgaagctttctcttcaaatctcagctacccgcaaagatcagctatggcaacttgtgggaggggacgtttttgaggccaaagaacatcctggaagaggcttctctgacccaaggaaaggcaagctggggctggaggtacagcctgacattcacatacgtgcacccacatgaggaatgtccagaaaatacctgcccccttatcttctctagccttattttatttacatatttctttatttttgcttttttttttttttttggagacaagatctcatgtatcccaggctggggatgacctttaaactctgactctcctgcatctatctcctgcgtgctgggattacaatacagagctgggaaccgaaccaaggggctcgtgcatgctgggcaagcctttcaccagctgaactgtgtccccgccccatctcatccttctttcttaatagaaaacctgagctggaaacctttggaacattccagcaaggacttcagtgggtcataacataattctagaaaacagtcaaatacacacacggaatcaggctaattaagaccaaaagggaaaagaaactgggaaggcagatgttatccttggcaaactctccacttgtgcagtacgctcaggagtcacgtgttatttccttccatccttaggttcaggtgtcaggtgtcactgtcatttctattaaccccccccccccacacacacacacacacgcacaagattctgataattggttctcaggttgtcacttgttgaagtcacacacttacaaaccagagctaggtatgatacacacgtgtggtctgtatagcattcaagaagatgaggcaggatgactgtagtgtctgaggccagcctaagctacccattgagttctgagccatcctgggctataaagcaagaccctgtcttgaaacagagaggagggttggtcctggagagacagatggctcagtggttaagcgcactttactgttcttgtggaggactggggttctatccggtgacttacacccaacttaaactacagtgccaggagatcccatgtcctctcctggtctctgctggcaccaagggagtgtgtggtatacagacatacatacattcaagcatataaatcatacacataaaataaaaataagtgtttttttttaaagggagaaaaatatctttataatattctctgttcacttcctccattgctggggactcaggatgcttatttgaatggaatttgtacggatcaattttttcttttctttcttttttttttttttcttcgagacagggtttctctgtatagccctggctgtcctggaactcactttgtagaccaggctggcctcgaactcagaaatctgcctgcctctgcctcccgagtgctgggattaaaggcatgtgtcaccacgcccagatccggatcaatttttttaaaagatttatttattatatgtatgtgaatacactgtagctgtacaaatggttgtgagcctccatgtggttgctgggaactgaatttttaggacctctgatcgtcagtccctgtttgctcccacgcaaagatttatttattattatacataagtacactgtagctgacttcagacgaaccagaagagggcgtcagatctcattacgggtggttgtgagccaccatgtgggtgctggaaattgaactcaggaccttcggaagagcagtcagtgctcttacccgctgaaccatctcgccagcccgggtcaattcttcatatcataaaatatactaaatctcgtagaggaaagagagttaagcattaggggaagcaatcagaggacaccacaacagcaagctccacggagataaactcggaggtactttagatacaaaaaacgtttaaatctgcctaaaacgaagggaggggctctacgcaggagttctgggaagacattagcgattcctgaaagtcgttttcacgacagaagccagtgattctgtggtgtgtgaaagtgttcagacacagatcacccctgctgcaaacagcagttgaattcctgacccttgtcttgtcctgacctaggtcttgtccctcctcccagacctagccaagggagagaaggcccctttgagtcctgcagaaatgcagcctcttcatgggtggggcatggacagctgttgcagtcacagtgagggggtggggcgggggcggggcgcctcccccccaccccccacccccgcagcgatctgcaggaggccaacgactgcgaactgcgtggacctgagctggcatttggccaggacaatgggattaacttcccaagcgctggccaaaaagggccctgggatttttatttttattcgttttccattacaactgcacagcaacgcaaacaaagccccaaacaaggtgagccaccatggagtcccttcccttcgcggggtggcatctcagtg

SEQ ID NO: 527 - DNA, 67 bp, Homo sapiens
gtgctgggccacttcggcgtcaacgagagtacggggctgagcctggaacaggtcaagaagcttaagg

SEQ ID NO: 528 - DNA, 50 bp, Homo sapiens
tggaacttgtgattgagcagtttgaagacttgctagttaggattttatta

SEQ ID NO: 529 - DNA, 50 bp, Homo sapiens
gcatgagatgccttttattcttgaattacgttattcttacaaaaaccacg

SEQ ID NO: 530 - DNA, 78 bp, Homo sapiens
agtgaataaaacagacagagacccttacctggaggataatactgctgagaaaaataaagcaagggggtttggatatca

SEQ ID NO: 531 - DNA, 63 bp, Homo sapiens
agcattgaacttgtttgataatgtatgtcccagaagacaggtattattgtatttagcacaaag

SEQ ID NO: 532 - DNA, 47 bp, Homo sapiens
agagctaattaaagtttcttgtttctgatatgctctccttggcaaat

SEQ ID NO: 533 - DNA, 45 bp, Homo sapiens
ttttactcatattagtagccaatgcaattgtgggtgtatggcagg

SEQ ID NO: 534 - DNA, 46 bp, Homo sapiens
cttaaggaatatgagcctgaaatgggcaaagtgtatcgacaggaca

SEQ ID NO: 535 - DNA, 46 bp, Homo sapiens
gtattaatttccattactaagttttcccagcttacctcctttgaat

SEQ ID NO: 536 - DNA, 47 bp, Homo sapiens
aaagctatgggagtggtggtagcaactggagttaacaccgaaattgg

SEQ ID NO: 537 - DNA, 46 bp, Homo sapiens
tggggaacagctttccaaagtcatctcccttatttgcattgcagtc

SEQ ID NO: 538 - DNA, 85 bp, Homo sapiens
cccgtctgtggaaacccttggttgtacttctgttatctgctcagacaagactggtacacttacaacaaaccagatgtcagtctgc

SEQ ID NO: 539 - DNA, 46 bp, Homo sapiens
taaagatgataaaccagtgaattgtcaccagtatgatggtctggta

SEQ ID NO: 540 - DNA, 45 bp, Homo sapiens
aaaaagttggagaagctacagagactgctctcacttgcctagtag

SEQ ID NO: 541 - DNA, 42 bp, Homo sapiens
ggtgcacccacattcgagttggaagtactaaggttcctatga

SEQ ID NO: 542 - DNA, 46 bp, Homo sapiens
aagaaatgcaccttgaggactctgccaactttattaaatatgaggt

SEQ ID NO: 543 - DNA, 31 bp, Homo sapiens
aggcatccgggtcatcatgatcactggggac

SEQ ID NO: 544 - DNA, 70 bp, Homo sapiens
actcaacccctccgcccagcgagacgcctgcctgaacgcccgctgttttgctcgagttgaaccctcccac

SEQ ID NO: 545 - DNA, 48 bp, Homo sapiens
tggcggatgacaacttctccaccattgtggctgccgttgaggaggggc

SEQ ID NO: 546 - DNA, 66 bp, Homo sapiens
gcagtttgctctccagattgcagcagctttggtctttgtgcctgagttggaagaggggagtgggca

SEQ ID NO: 547 - DNA, 109 bp, Homo sapiens
atttcccgaggctttgattcctgttcagctgctctgggtcaatctggtgacagatggcctgcctgccactgcactggggttcaaccctcctgatctggacatcatgaat

SEQ ID NO: 548 - DNA, 66 bp, Homo sapiens
aaacctccccggaacccaaaggaaccattgatcagcgggtggctctttttccgttacttggctatt

SEQ ID NO: 549 - DNA, 47 bp, Homo sapiens
tcattgctgctgacggtggtccaagagtgtccttctaccagctggta

SEQ ID NO: 550 - DNA, 71 bp, Homo sapiens
tcctacagtgtaaagaggacaacccggactttgaaggcgtggattgtgcaatctttgaatccccatacccg

SEQ ID NO: 551 - DNA, 55 bp, Homo sapiens
atgacaatggcgctctctgttctagtaactatagaaatgtgtaacgccctcaaca

SEQ ID NO: 552 - DNA, 700 bp, Homo sapiens
ctctctgttctagtaactatagaaatgtgtaacgccctcaacaggttagtgcaccttcacggcaggctgaggcgagcatggtgactgccagggcaccggggaattgtgtgtagtcacggttgattgaggatcacaggacagttcttcccttcccaaaagaaaggagaacaggcaataccagttttaaaagcatgagctgtcgtcacctccaggaagtagtgggagtgcttagccctgtgtttcttaggagctcttccttaaaagaaaccgtgggggccaaaaataggaactttggtacccctgtatgccagcacccacagggaaggaacctcaccctttcacacagacaaatggtaccatccagttaagcccgtgacaaaaatggaaatttctaaatagcccaagtctccagggcaattgggaacagctttgaacccactaagatggggtctgctatgccaaaacatagatacagaattcacagtttgtcctgcattaggacattctcttcaactttgccactgtagaaagtggaggtaggtcagcggatggtgccacattaacagccgccttactgaagtgtagtccaacagggtcttactgccactgtgacacgtgccttgccttgggggtgcgtttccccacctctccttgctctgcagcttgtccgaaaaccagtccttgctgaggatgcccccct

SEQ ID NO: 553 - DNA, 42 bp, Homo sapiens
agcttgtccgaaaaccagtccttgctgaggatgcccccctgg

SEQ ID NO: 554 - DNA, 29 bp, Homo sapiens
ctccttgcccgtgattctcatggatgaga

SEQ ID NO: 555 - DNA, 52 bp, Homo sapiens
tacacataattaaagtgtccattgacatgtacagagaactaacactatttta

SEQ ID NO: 556 - DNA, 46 bp, Homo sapiens
tagttgagccagcagacattgtcagcaaattaattggcagcagatt

SEQ ID NO: 557 - DNA, 49 bp, Homo sapiens
ggtttgctacttccctcacccactttggcctccgttcaccccaccccac

SEQ ID NO: 558 - DNA, 50 bp, Homo sapiens
gagaggtatgcctgtactcgcttgtgcagaaaacattgttccagattcaa

SEQ ID NO: 559 - DNA, 50 bp, Homo sapiens
atgtacagtattcaattgtaatgcatgccttcggttgtaagtagccagat

SEQ ID NO: 560 - DNA, 4067 bp, Homo sapiens
tcacgtgcccctcttgaagcggctctgatcctgtgacctaaccagtttccacctggcttctctcagtgcgttgccatatagtataattttttgtttgtttgtttcgtgtagggttttgttggttcttttccaagtatcaatcaaaactacatgccaacgtccactccttggaaataattaaatgacatgacgtgcctgattttttcagctggtgatgcactgtaatttgcatctgctgaaggaatttatcttaagtcctgaagcccagccacttgagacaactgaggtgatttttctgctctgcttttgctcatgcggatggtgcgttattgttaaacacaaaagtggactaattgcttcattctgcaacctactccgtgaagaaagctgctcttctttgtgaagagaatatgttcatgttttgttcatgaattccatgcaatttcccatccccttgttaagtaatgtagcttctttatattggcaaaattccctttatcttgctgtgacctgcgctttgtcctcccgagcagagcaaatcatctgtggtttaagagcagctttggattcaagtccccttttctcctgtcgagggaagtgagtctatgaaatggccttcatctgaaagccacagcgaagcacctcctagcccaagtctagctgctgtgtggcagctccagcggcgtgaactgtgactgccctgcagacacctatcaagcgctgcgtcagctattaataataaaatcaactcttctccctcccccccgcgaggggggttccctcgtcagggcccagaacccgctggggaagaatcggggctggcgtgcgaaggagctggcggcagggggtgtaggatgcggtgttcccgaggcgacagatgaaggatttgggttgtgtgggaagtgaactgcggaattcctccccttggtttctgaggggggctctgaaggagccagattaggatgcagagcgcagcccgggcgaccgagggcgaggaggcgagccaaggacatcagcccgagggcgcctcgagacgccccgcgtggaccgcgctcccagctcctcggcctcgccttccaaccatccgcccaccggccccagagcagcgtgcccactgtgagcgccccaccctgcgtctgcaggtgggtgggtcagagaaccgcaggcacagaagagggtacccagcttcccctccgccagccccgcgaccgcggcgcgcgcggcctcgatccgggttcctaggggcggcgcgcgggagggggcggggcctgcgcggcagcgtgggcgccaggcgcgcgggaggagggagccgggaggagggggcggggccgcgccgcccgcgccgcgctgggcgctctcggccaatgagcggcgtccacatgccgcggcggcggcgaaaggggaggcagcggccgataaatgctattagagcagccgccgcggagccgtccccgacgccacctccttttccttcgccgcagtttcctccgccgctgtcgggcgtgcggcgctgagggacccgggcgagcgcgccgcgcaccgccccgccggctcgcctccctcgccgcgttccgccctcagtggtctgccgggcgccccctcctccggcccgggcggggcctctgatcgcctcaagagagcggggagggggctcgggggccgcggcctgccctcccggcgggcggctgagggcgagggaggccctcccttctggcgaggggagggagggtgggtcaggagcccccaacccgccctgcggagctcggggccgcgcgaggggcggttgtctgggggagggggcgcggggtgattcagcgcccggcgaggcggaagcggccgcaagaggaggaggggagagcccgtccgcgcctgggctcccggggtggcacgagcccgcggccggagtgcgaggcggaggcgaggaggccgcggggacgggaggcgaggccggccgggcccccgaagccatggagaacgcgcacaccaagacggtggaggaggtgctgggccacttcggcgtcaacgagagtacggggctgagcctggaacaggtcaagaagcttaaggagagatggggctccaacggtaggtgcagggcgctccgctgcaggggcccggcgcggccgggagagccagggaagatggctgaccgggctccacctcgtgggcttcggctccgcgcccgccgacagctgcgggcggagggtcgggccagcgcgccggccccgcgggagagaaaggggctgcggtcctcgcctcgccttccctggacctcttcgcttctcgggccctcgaccttttcggcgcgcaaggctcggaggcttctctccagcagcagccggccccggtggagggagggacgtggcttctgcagctaggttgagcccggcaagacgttttctcgtcccctgccgatttatgaggagtcgaggtcgttggaaggcctctgaccgttcttgtcctacccaaagttacacatctggcagaagtgatgacatcgctgaaaccactcctaggttcaggagcccgaagtgatttcacgcttagggctagacctcaggccattgattacaaagagtgcatgcttccttgagatatcttcgtggtatgccctctgctaaaaaaatcggatattcttatagctaggtctgtgttttaaagatattgatgcttagaattgtagcagttctttttagaaaaacgaagtgctaaaatgtctctctctttttttttttaacctccctcttgacacattgcttgacgaatttctacattctacagagttaccggctgaagaaggtaatcttaacatgctgtttctgttttttttcctctgttggtgtgctgatggtaagatgacagttaaaacacatgtgtttgtttcttacaggaaaaaccttgctggaacttgtgattgagcagtttgaagacttgctagttaggattttattactggcagcatgtatatcttttgtaagtataaaaaaatttattttctttccccccaaaagctgaaagtattccatagataaatcagaaaacaaatgatgtccattgggtgaaaacatatttggagttgcaagctgtgtctctatgtttaaaaacaatctgggcattttaaaattacaaaacaaaacacttgaagccattggtattcagaaaatagatgcctgacatttacagtgtggttaggagttgtcccagagtgtggcatggtcttagaaattcttgtggtttatcagcttttaatatcaaaaagttcttttctgggaagcctttaatgttttgggttcttccattgttatcgtgttgtaagatcatactaagatgatgttggactctttgtagtctgtaaatagaacttacaaaaggaatattccagttgctttcccttcctggtaatggcaaggtgacagttgttcctgacggtgacaagaatgatgacggctgtgatggcacccttgttgaccaaatttggtcactgacctttagggtggtatatttatctaaattggacccctgtcttaagtgattcttaggttgaaagaacaaggtttagtacagttggttctagatcttaaaggaaaaaaaccagcatggtgttttttcttgttctgtgtgtgcttacccacttgagtgctatatggttgctaagaaactagtgaaatgcaaagaactacagcagaaaaagggtgttggggtggcaagtatatttctaggtttttaacttttttttaaatgttcggtattaattttttgttgcattttttttcttgggcagtagattgcttgctagttttcctaaaaatggtcaggaataggacacagatgttcctaattctaatagcatgagatgccttttattcttgaattacgttattcttacaaaaaccacgataagtgaaattcacccagtgcagtacttctttctagttaaaacaaaattgacaaaacttcacggtttcagttcttgtacatatatgtatgcaggtcccagggatcagcctcagtctttgtgagaaccataccatagagggctattttgagaacgaaataaacaaagcagt

SEQ ID NO: 561 - DNA, 4050 bp, Homo sapiens
gtgaactgcggaattcctccccttggtttctgaggggggctctgaaggagccagattaggatgcagagcgcagcccgggcgaccgagggcgaggaggcgagccaaggacatcagcccgagggcgcctcgagacgccccgcgtggaccgcgctcccagctcctcggcctcgccttccaaccatccgcccaccggccccagagcagcgtgcccactgtgagcgccccaccctgcgtctgcaggtgggtgggtcagagaaccgcaggcacagaagagggtacccagcttcccctccgccagccccgcgaccgcggcgcgcgcggcctcgatccgggttcctaggggcggcgcgcgggagggggcggggcctgcgcggcagcgtgggcgccaggcgcgcgggaggagggagccgggaggagggggcggggccgcgccgcccgcgccgcgctgggcgctctcggccaatgagcggcgtccacatgccgcggcggcggcgaaaggggaggcagcggccgataaatgctattagagcagccgccgcggagccgtccccgacgccacctccttttccttcgccgcagtttcctccgccgctgtcgggcgtgcggcgctgagggacccgggcgagcgcgccgcgcaccgccccgccggctcgcctccctcgccgcgttccgccctcagtggtctgccgggcgccccctcctccggcccgggcggggcctctgatcgcctcaagagagcggggagggggctcgggggccgcggcctgccctcccggcgggcggctgagggcgagggaggccctcccttctggcgaggggagggagggtgggtcaggagcccccaacccgccctgcggagctcggggccgcgcgaggggcggttgtctgggggagggggcgcggggtgattcagcgcccggcgaggcggaagcggccgcaagaggaggaggggagagcccgtccgcgcctgggctcccggggtggcacgagcccgcggccggagtgcgaggcggaggcgaggaggccgcggggacgggaggcgaggccggccgggcccccgaagccatggagaacgcgcacaccaagacggtggaggaggtgctgggccacttcggcgtcaacgagagtacggggctgagcctggaacaggtcaagaagcttaaggagagatggggctccaacggtaggtgcagggcgctccgctgcaggggcccggcgcggccgggagagccagggaagatggctgaccgggctccacctcgtgggcttcggctccgcgcccgccgacagctgcgggcggagggtcgggccagcgcgccggccccgcgggagagaaaggggctgcggtcctcgcctcgccttccctggacctcttcgcttctcgggccctcgaccttttcggcgcgcaaggctcggaggcttctctccagcagcagccggccccggtggagggagggacgtggcttctgcagctaggttgagcccggcaagacgttttctcgtcccctgccgatttatgaggagtcgaggtcgttggaaggcctctgaccgttcttgtcctacccaaagttacacatctggcagaagtgatgacatcgctgaaaccactcctaggttcaggagcccgaagtgatttcacgcttagggctagacctcaggccattgattacaaagagtgcatgcttccttgagatatcttcgtggtatgccctctgctaaaaaaatcggatattcttatagctaggtctgtgttttaaagatattgatgcttagaattgtagcagttctttttagaaaaacgaagtgctaaaatgtctctctctttttttttttaacctccctcttgacacattgcttgacgaatttctacattctacagagttaccggctgaagaaggtaatcttaacatgctgtttctgttttttttcctctgttggtgtgctgatggtaagatgacagttaaaacacatgtgtttgtttcttacaggaaaaaccttgctggaacttgtgattgagcagtttgaagacttgctagttaggattttattactggcagcatgtatatcttttgtaagtataaaaaaatttattttctttccccccaaaagctgaaagtattccatagataaatcagaaaacaaatgatgtccattgggtgaaaacatatttggagttgcaagctgtgtctctatgtttaaaaacaatctgggcattttaaaattacaaaacaaaacacttgaagccattggtattcagaaaatagatgcctgacatttacagtgtggttaggagttgtcccagagtgtggcatggtcttagaaattcttgtggtttatcagcttttaatatcaaaaagttcttttctgggaagcctttaatgttttgggttcttccattgttatcgtgttgtaagatcatactaagatgatgttggactctttgtagtctgtaaatagaacttacaaaaggaatattccagttgctttcccttcctggtaatggcaaggtgacagttgttcctgacggtgacaagaatgatgacggctgtgatggcacccttgttgaccaaatttggtcactgacctttagggtggtatatttatctaaattggacccctgtcttaagtgattcttaggttgaaagaacaaggtttagtacagttggttctagatcttaaaggaaaaaaaccagcatggtgttttttcttgttctgtgtgtgcttacccacttgagtgctatatggttgctaagaaactagtgaaatgcaaagaactacagcagaaaaagggtgttggggtggcaagtatatttctaggtttttaacttttttttaaatgttcggtattaattttttgttgcattttttttcttgggcagtagattgcttgctagttttcctaaaaatggtcaggaataggacacagatgttcctaattctaatagcatgagatgccttttattcttgaattacgttattcttacaaaaaccacgataagtgaaattcacccagtgcagtacttctttctagttaaaacaaaattgacaaaacttcacggtttcagttcttgtacatatatgtatgcaggtcccagggatcagcctcagtctttgtgagaaccataccatagagggctattttgagaacgaaataaacaaagcagtgggcatttatttagttcagatgaggaaaagattaaatttatacccatcttttaagtagatagtggcagcagtaaataaatttgtggaataatttttacataaatcctgctatgatactttattatgccatattagccaagtattgtgtagccattaataattcagtccccaagaaccttttctgtggttttcattgattaaaatggggacttacatagcaaaccattcagcattctgagtcagtcacaatgtacctctgataaaatgtttcttcttgattgattaaaaaattttcccccagaaaatggctgctgttttaccaattaagggaaatgagtagacccgattaactatagtttatcaatacattgtcatggggcaaaataaatgatacatttggagctagtgtaagatttgtatttaactgggtacataatagcgttggcagttaaataatggggtccgataaggtcattgggaacttcttaaaaattaatcagctgactacaagccagaagcaaaatacatttttactgaattctctgtgttacaagttgaagcagtgtgggaaaccatgccactggtgttactattggggttgcactgggtctgttttttgagtggccagtttgagtgactttatattagcattttaaattaatgatgtgtgtgggttttgtttgttcattttttactttgaagtaattagaggcttatagtttgtaagcatttcaagcaggtttttaaataaatgctttaattttttttataagataggaccttggctttgtggagcattatagagctatattttggagttgaaatttgagctcctttttggtaactgtggagttactgctcaggaaatgaactgtgttacatttt

SEQ ID NO: 562 - DNA, 4050 bp, Homo sapiens
aggaggggagagcccgtccgcgcctgggctcccggggtggcacgagcccgcggccggagtgcgaggcggaggcgaggaggccgcggggacgggaggcgaggccggccgggcccccgaagccatggagaacgcgcacaccaagacggtggaggaggtgctgggccacttcggcgtcaacgagagtacggggctgagcctggaacaggtcaagaagcttaaggagagatggggctccaacggtaggtgcagggcgctccgctgcaggggcccggcgcggccgggagagccagggaagatggctgaccgggctccacctcgtgggcttcggctccgcgcccgccgacagctgcgggcggagggtcgggccagcgcgccggccccgcgggagagaaaggggctgcggtcctcgcctcgccttccctggacctcttcgcttctcgggccctcgaccttttcggcgcgcaaggctcggaggcttctctccagcagcagccggccccggtggagggagggacgtggcttctgcagctaggttgagcccggcaagacgttttctcgtcccctgccgatttatgaggagtcgaggtcgttggaaggcctctgaccgttcttgtcctacccaaagttacacatctggcagaagtgatgacatcgctgaaaccactcctaggttcaggagcccgaagtgatttcacgcttagggctagacctcaggccattgattacaaagagtgcatgcttccttgagatatcttcgtggtatgccctctgctaaaaaaatcggatattcttatagctaggtctgtgttttaaagatattgatgcttagaattgtagcagttctttttagaaaaacgaagtgctaaaatgtctctctctttttttttttaacctccctcttgacacattgcttgacgaatttctacattctacagagttaccggctgaagaaggtaatcttaacatgctgtttctgttttttttcctctgttggtgtgctgatggtaagatgacagttaaaacacatgtgtttgtttcttacaggaaaaaccttgctggaacttgtgattgagcagtttgaagacttgctagttaggattttattactggcagcatgtatatcttttgtaagtataaaaaaatttattttctttccccccaaaagctgaaagtattccatagataaatcagaaaacaaatgatgtccattgggtgaaaacatatttggagttgcaagctgtgtctctatgtttaaaaacaatctgggcattttaaaattacaaaacaaaacacttgaagccattggtattcagaaaatagatgcctgacatttacagtgtggttaggagttgtcccagagtgtggcatggtcttagaaattcttgtggtttatcagcttttaatatcaaaaagttcttttctgggaagcctttaatgttttgggttcttccattgttatcgtgttgtaagatcatactaagatgatgttggactctttgtagtctgtaaatagaacttacaaaaggaatattccagttgctttcccttcctggtaatggcaaggtgacagttgttcctgacggtgacaagaatgatgacggctgtgatggcacccttgttgaccaaatttggtcactgacctttagggtggtatatttatctaaattggacccctgtcttaagtgattcttaggttgaaagaacaaggtttagtacagttggttctagatcttaaaggaaaaaaaccagcatggtgttttttcttgttctgtgtgtgcttacccacttgagtgctatatggttgctaagaaactagtgaaatgcaaagaactacagcagaaaaagggtgttggggtggcaagtatatttctaggtttttaacttttttttaaatgttcggtattaattttttgttgcattttttttcttgggcagtagattgcttgctagttttcctaaaaatggtcaggaataggacacagatgttcctaattctaatagcatgagatgccttttattcttgaattacgttattcttacaaaaaccacgataagtgaaattcacccagtgcagtacttctttctagttaaaacaaaattgacaaaacttcacggtttcagttcttgtacatatatgtatgcaggtcccagggatcagcctcagtctttgtgagaaccataccatagagggctattttgagaacgaaataaacaaagcagtgggcatttatttagttcagatgaggaaaagattaaatttatacccatcttttaagtagatagtggcagcagtaaataaatttgtggaataatttttacataaatcctgctatgatactttattatgccatattagccaagtattgtgtagccattaataattcagtccccaagaaccttttctgtggttttcattgattaaaatggggacttacatagcaaaccattcagcattctgagtcagtcacaatgtacctctgataaaatgtttcttcttgattgattaaaaaattttcccccagaaaatggctgctgttttaccaattaagggaaatgagtagacccgattaactatagtttatcaatacattgtcatggggcaaaataaatgatacatttggagctagtgtaagatttgtatttaactgggtacataatagcgttggcagttaaataatggggtccgataaggtcattgggaacttcttaaaaattaatcagctgactacaagccagaagcaaaatacatttttactgaattctctgtgttacaagttgaagcagtgtgggaaaccatgccactggtgttactattggggttgcactgggtctgttttttgagtggccagtttgagtgactttatattagcattttaaattaatgatgtgtgtgggttttgtttgttcattttttactttgaagtaattagaggcttatagtttgtaagcatttcaagcaggtttttaaataaatgctttaattttttttataagataggaccttggctttgtggagcattatagagctatattttggagttgaaatttgagctcctttttggtaactgtggagttactgctcaggaaatgaactgtgttacatttttattttatgagttggtaaatagcaaaagaataagtgtttagggagtacttctatagaattaatttgctttggtttgtttgatcaaggaattgcagatataagacctgttgtgttgattttcttcatgtggggttgggtactgctgctgcattgtctttagtgtttcattcctcctgtctgtatcttttaaaagaaagagcactgactctctttttgtgtcagtttattcctattgatgtaacagaaaaaacatggtagaatattcaggtttttttggagaagtgactaggcgattcttatatacatcatgcgtcatcaagtcatgcttaaattaaaaagaatattagtgacttacttcaaatatcaaactaagtagtaaactgttaactatagttaatattttgctgtggcatagaataggaagctatgcttgtgacctgtagggatctagtttaatttgtaatattggccaaagtgtttttttgaaacggtcacttggattgaaagaaataagcttcatcttccagtgcatatgaacattagaaattgcttaatttgacactgaagaccccccctctatcattcactttatcttttcattctcttcttgattaccaactttgttctaaatgtaacacatcgtatggttgcttaactgatgcctgccctttcttctcttttcctgctttgttaagatatttattgagcacctgtcacagacactggggatacagtagtgaataaaacagacagagacccttacctggaggataatactgctgagaaaaataaagcaagggggtttggatatcagagtatgtgaaagggggaacagttttcaaattgggtggtccggaaagttcttgaggaaggtgacatttgcgaaaagatctgaaggaggtgggcattagggccatgttggtctcccatctgtctaaatcata

SEQ ID NO: 563 - DNA, 4078 bp, Homo sapiens
aaagggtgttggggtggcaagtatatttctaggtttttaacttttttttaaatgttcggtattaattttttgttgcattttttttcttgggcagtagattgcttgctagttttcctaaaaatggtcaggaataggacacagatgttcctaattctaatagcatgagatgccttttattcttgaattacgttattcttacaaaaaccacgataagtgaaattcacccagtgcagtacttctttctagttaaaacaaaattgacaaaacttcacggtttcagttcttgtacatatatgtatgcaggtcccagggatcagcctcagtctttgtgagaaccataccatagagggctattttgagaacgaaataaacaaagcagtgggcatttatttagttcagatgaggaaaagattaaatttatacccatcttttaagtagatagtggcagcagtaaataaatttgtggaataatttttacataaatcctgctatgatactttattatgccatattagccaagtattgtgtagccattaataattcagtccccaagaaccttttctgtggttttcattgattaaaatggggacttacatagcaaaccattcagcattctgagtcagtcacaatgtacctctgataaaatgtttcttcttgattgattaaaaaattttcccccagaaaatggctgctgttttaccaattaagggaaatgagtagacccgattaactatagtttatcaatacattgtcatggggcaaaataaatgatacatttggagctagtgtaagatttgtatttaactgggtacataatagcgttggcagttaaataatggggtccgataaggtcattgggaacttcttaaaaattaatcagctgactacaagccagaagcaaaatacatttttactgaattctctgtgttacaagttgaagcagtgtgggaaaccatgccactggtgttactattggggttgcactgggtctgttttttgagtggccagtttgagtgactttatattagcattttaaattaatgatgtgtgtgggttttgtttgttcattttttactttgaagtaattagaggcttatagtttgtaagcatttcaagcaggtttttaaataaatgctttaattttttttataagataggaccttggctttgtggagcattatagagctatattttggagttgaaatttgagctcctttttggtaactgtggagttactgctcaggaaatgaactgtgttacatttttattttatgagttggtaaatagcaaaagaataagtgtttagggagtacttctatagaattaatttgctttggtttgtttgatcaaggaattgcagatataagacctgttgtgttgattttcttcatgtggggttgggtactgctgctgcattgtctttagtgtttcattcctcctgtctgtatcttttaaaagaaagagcactgactctctttttgtgtcagtttattcctattgatgtaacagaaaaaacatggtagaatattcaggtttttttggagaagtgactaggcgattcttatatacatcatgcgtcatcaagtcatgcttaaattaaaaagaatattagtgacttacttcaaatatcaaactaagtagtaaactgttaactatagttaatattttgctgtggcatagaataggaagctatgcttgtgacctgtagggatctagtttaatttgtaatattggccaaagtgtttttttgaaacggtcacttggattgaaagaaataagcttcatcttccagtgcatatgaacattagaaattgcttaatttgacactgaagaccccccctctatcattcactttatcttttcattctcttcttgattaccaactttgttctaaatgtaacacatcgtatggttgcttaactgatgcctgccctttcttctcttttcctgctttgttaagatatttattgagcacctgtcacagacactggggatacagtagtgaataaaacagacagagacccttacctggaggataatactgctgagaaaaataaagcaagggggtttggatatcagagtatgtgaaagggggaacagttttcaaattgggtggtccggaaagttcttgaggaaggtgacatttgcgaaaagatctgaaggaggtgggcattagggccatgttggtctcccatctgtctaaatcataaagtcataattaatatggtaataatttgcataggtttctctaccttccaccgtcgtttcccatgtcagctacttagattgaccctaaaatgctaataaaactttctagactgtggtacttctcaacctttaggttacatttgaccatttgcatgtgtgtgtctcttttcttcctactagacccccttgagttagtgcttttttttttttttttttttaaatgtagatggagtctcactcttgttgcccgggctggagcgcagtggtgcaatctcggctcactgcaacctccacctcctgggttcaagtgattctcctgcctcagcctcctgagtagctgggattacagatgtccaccaccacgcccggctaatttttgtatttttagtagagatggggtttacctttgttggccaggctggtctcgaactcctgacctcaggttatcacctgcctcagcctcccaaagtgctgggattacaggcatgaaccactgcgcctggcctaagttagtgcttttgatgtcacaaaaacttgggtgagtttgtttcagtagaattttctgaaaatacatgagatctttttactgtagtttctcagaagagaatactcaaagcatttgatactggatttgtagtgattttaattttcttctgtatcttttaatttttgattttaaaaatgggataagaagggcaaattactgattggtttaactagtttattcagagcttttcttaaaataatgacttgaaaggtggatttaatagagtactttttaaaaagattgttttctcatgcctgaaagcattgaatgtttttacatagctttatatctggatcagaagggaacgagttctaattcatgcttttttttccgttttattaatgactgaaagtcctcccccagaaattatcgtaacgtttattggtaattctctgtatcattctcgaaatgtttaatttccatttcctctttatttaaaaaaaaaaaaaaacttgatgtaaatttcttcatttattgagcaattgtttgagggcccaaaggcacagtgcaagtttctgagaatactaggagcaaaatgtgcttatgatctttttaagcacttttttctttcgttttctttttatgatactaagagctcttcctattatcacagtgtatagatatctgagtcacaatatcatgactgtctcccagtttacagcagaacgtgctttttaccttggattaaaatttgctttatttggccgggtgcagtgagtggctcatgcctgtaatcccagcactttgagaggccgaggtgggtggatcatttgaggtcaggagttcgagaccagcctggccaacatggtgaaaccccacctgtactaaaaatacaaaaattagccaggcgtggtggtgggtccctgtaatcccagctactcaggaggctgaggcaggagaatcgcttgaacccgggaggcggatgttgcagtgagccgagattgcgccactgcactccagcctgagtgacaaagtgagactccgtctcaaaaaaaaattttttttttgctttagtatacttatcagaagtataatgcagtacagagtgttgtacagtatttcagtgctgtacagagattaatcttgtggataataattgggagatactctatccctactctatttttaacagtttaatgtagttgagtgttcattagcaagtggttactttgaataatactggcacatttgaagcattgaacttgtttgataatgtatgtcccagaagacaggtattattgtatttagcacaaagcaaagggaagaagaaacactgtttatgtccaaaactatggggcagtggtcttctcttttacttttctt

SEQ ID NO: 564 - DNA, 4063 bp, Homo sapiens
ctgctttgttaagatatttattgagcacctgtcacagacactggggatacagtagtgaataaaacagacagagacccttacctggaggataatactgctgagaaaaataaagcaagggggtttggatatcagagtatgtgaaagggggaacagttttcaaattgggtggtccggaaagttcttgaggaaggtgacatttgcgaaaagatctgaaggaggtgggcattagggccatgttggtctcccatctgtctaaatcataaagtcataattaatatggtaataatttgcataggtttctctaccttccaccgtcgtttcccatgtcagctacttagattgaccctaaaatgctaataaaactttctagactgtggtacttctcaacctttaggttacatttgaccatttgcatgtgtgtgtctcttttcttcctactagacccccttgagttagtgcttttttttttttttttttttaaatgtagatggagtctcactcttgttgcccgggctggagcgcagtggtgcaatctcggctcactgcaacctccacctcctgggttcaagtgattctcctgcctcagcctcctgagtagctgggattacagatgtccaccaccacgcccggctaatttttgtatttttagtagagatggggtttacctttgttggccaggctggtctcgaactcctgacctcaggttatcacctgcctcagcctcccaaagtgctgggattacaggcatgaaccactgcgcctggcctaagttagtgcttttgatgtcacaaaaacttgggtgagtttgtttcagtagaattttctgaaaatacatgagatctttttactgtagtttctcagaagagaatactcaaagcatttgatactggatttgtagtgattttaattttcttctgtatcttttaatttttgattttaaaaatgggataagaagggcaaattactgattggtttaactagtttattcagagcttttcttaaaataatgacttgaaaggtggatttaatagagtactttttaaaaagattgttttctcatgcctgaaagcattgaatgtttttacatagctttatatctggatcagaagggaacgagttctaattcatgcttttttttccgttttattaatgactgaaagtcctcccccagaaattatcgtaacgtttattggtaattctctgtatcattctcgaaatgtttaatttccatttcctctttatttaaaaaaaaaaaaaaacttgatgtaaatttcttcatttattgagcaattgtttgagggcccaaaggcacagtgcaagtttctgagaatactaggagcaaaatgtgcttatgatctttttaagcacttttttctttcgttttctttttatgatactaagagctcttcctattatcacagtgtatagatatctgagtcacaatatcatgactgtctcccagtttacagcagaacgtgctttttaccttggattaaaatttgctttatttggccgggtgcagtgagtggctcatgcctgtaatcccagcactttgagaggccgaggtgggtggatcatttgaggtcaggagttcgagaccagcctggccaacatggtgaaaccccacctgtactaaaaatacaaaaattagccaggcgtggtggtgggtccctgtaatcccagctactcaggaggctgaggcaggagaatcgcttgaacccgggaggcggatgttgcagtgagccgagattgcgccactgcactccagcctgagtgacaaagtgagactccgtctcaaaaaaaaattttttttttgctttagtatacttatcagaagtataatgcagtacagagtgttgtacagtatttcagtgctgtacagagattaatcttgtggataataattgggagatactctatccctactctatttttaacagtttaatgtagttgagtgttcattagcaagtggttactttgaataatactggcacatttgaagcattgaacttgtttgataatgtatgtcccagaagacaggtattattgtatttagcacaaagcaaagggaagaagaaacactgtttatgtccaaaactatggggcagtggtcttctcttttacttttctttgctgctgttcatgaagcttgttaccttttcgctgtcttttttttgagacggagtcctgctctgtcgcccagattggagtgcagtggtgcgatcttggctcactgcaacctccacctcccagcttcaagtgattctcctgcctcagcctcccgagtagctgggattacaggcatgcaccaccacgcccgggtaattttttgtatttttagtagagacggggtttctccatgttgaccaggctggtctccagctcctggccttaggtgatccgcctgcctcagcttcccaaagtgctgggattacagacatgagccacctcacccagcccagataatccttttacacactgtttaaaattttcaattttcctggagatagggtctcctgtcgcccagcgggtaaatgcagtggtgcgattatagctcactgcagcctcagacacctgggctgaagcctgattcttgagcctcccaagtagctgggactataggtgtgagccatcatgctttgcccttttttttttttttttttttttttgaggcagagtctcactctgtcacctaggctggaatgtagtagtggcacgatcatagctcattataacctcaaactcctggtttcaagcaatcttcccgagtagtcaggactacaggcatgccctgccatgcccaactaattaaaaaaaaatttttttttatacacatagggtctcactatgttactcaagctagtctccaattcctggccttaagagattttcccaaagcattaggattataggcatgagccacctcacccagctgaaacagataattctttttttttttttccttgagatggagttttgctcttgtcagccaggctggagtgcaatggcgcgatctcggctcgctgtaacctctgcctcccggggtcaagcgattctcctgtctcagcttccccagtagctgggattacaggcgtccaccaccacactcggctaattttttgtattttagtagagatgggttttcgccatgttggtcaggctggtcttgaactcctgacctcaggtgatctgcccacctcagcctcccaaagtgctgtgattacaggtgtgagccactgctcctggcttgaaacagataattctttatattcaacctgttgtcaaaatttttagaaacattttcccagttccttgtataagtatactttgtataacttctggcaaaccataattatgaactcacattactatagtactataatactgcagtaagggatcttgcgtttcagtaatgtcactcatccagttttcctcccctttctcttaccccatctccctcccagtctcatggtttctgttgtcaatcctctttctccttacacaaggcaagaggttttcttaccaatagatcagaactgtgaaggactgcccgacatgatctgatatggttgttcttcattttgggctgtagtattttaaagtagaggtttgctctgatggtcccatcactgcttgccattgtctttccctttgctctagctatcaggggatgttgctttaagtttgttccccaggctttactgccaagagggaaattcatacccactttaacaaggtgtgaagcttatcttacagttgctaatgcctcactgaccttttggaaaggtcatagttactcttcaagttgagcgatttttctcccccaagagctaattaaagtttcttgtttctgatatgctctccttggcaaatgtttgaaagtctagtatcagagcagctgtgatcctgcatctatcaaaatttataacttcctagagaagttttcattctggcattattcctggccttaacactagaatgccctgttgaaagcatacagtaacatttattatactcattctggttgtctgtttgccctagctcactggacgttggtggtgat

SEQ ID NO: 565 - DNA, 4047 bp, Homo sapiens
cttatcagaagtataatgcagtacagagtgttgtacagtatttcagtgctgtacagagattaatcttgtggataataattgggagatactctatccctactctatttttaacagtttaatgtagttgagtgttcattagcaagtggttactttgaataatactggcacatttgaagcattgaacttgtttgataatgtatgtcccagaagacaggtattattgtatttagcacaaagcaaagggaagaagaaacactgtttatgtccaaaactatggggcagtggtcttctcttttacttttctttgctgctgttcatgaagcttgttaccttttcgctgtcttttttttgagacggagtcctgctctgtcgcccagattggagtgcagtggtgcgatcttggctcactgcaacctccacctcccagcttcaagtgattctcctgcctcagcctcccgagtagctgggattacaggcatgcaccaccacgcccgggtaattttttgtatttttagtagagacggggtttctccatgttgaccaggctggtctccagctcctggccttaggtgatccgcctgcctcagcttcccaaagtgctgggattacagacatgagccacctcacccagcccagataatccttttacacactgtttaaaattttcaattttcctggagatagggtctcctgtcgcccagcgggtaaatgcagtggtgcgattatagctcactgcagcctcagacacctgggctgaagcctgattcttgagcctcccaagtagctgggactataggtgtgagccatcatgctttgcccttttttttttttttttttttttttgaggcagagtctcactctgtcacctaggctggaatgtagtagtggcacgatcatagctcattataacctcaaactcctggtttcaagcaatcttcccgagtagtcaggactacaggcatgccctgccatgcccaactaattaaaaaaaaatttttttttatacacatagggtctcactatgttactcaagctagtctccaattcctggccttaagagattttcccaaagcattaggattataggcatgagccacctcacccagctgaaacagataattctttttttttttttccttgagatggagttttgctcttgtcagccaggctggagtgcaatggcgcgatctcggctcgctgtaacctctgcctcccggggtcaagcgattctcctgtctcagcttccccagtagctgggattacaggcgtccaccaccacactcggctaattttttgtattttagtagagatgggttttcgccatgttggtcaggctggtcttgaactcctgacctcaggtgatctgcccacctcagcctcccaaagtgctgtgattacaggtgtgagccactgctcctggcttgaaacagataattctttatattcaacctgttgtcaaaatttttagaaacattttcccagttccttgtataagtatactttgtataacttctggcaaaccataattatgaactcacattactatagtactataatactgcagtaagggatcttgcgtttcagtaatgtcactcatccagttttcctcccctttctcttaccccatctccctcccagtctcatggtttctgttgtcaatcctctttctccttacacaaggcaagaggttttcttaccaatagatcagaactgtgaaggactgcccgacatgatctgatatggttgttcttcattttgggctgtagtattttaaagtagaggtttgctctgatggtcccatcactgcttgccattgtctttccctttgctctagctatcaggggatgttgctttaagtttgttccccaggctttactgccaagagggaaattcatacccactttaacaaggtgtgaagcttatcttacagttgctaatgcctcactgaccttttggaaaggtcatagttactcttcaagttgagcgatttttctcccccaagagctaattaaagtttcttgtttctgatatgctctccttggcaaatgtttgaaagtctagtatcagagcagctgtgatcctgcatctatcaaaatttataacttcctagagaagttttcattctggcattattcctggccttaacactagaatgccctgttgaaagcatacagtaacatttattatactcattctggttgtctgtttgccctagctcactggacgttggtggtgattggcatctgtcaggacttggtggtcctggtgcctcctgtttttatttttctttttgtcctgctcaaacagatatttcttattcatgccgtcttctaatgagtcatttggattcattattgccataaatcatttggaggagtgttttcatgatttactaagtagatcttttaaagaagattttattatgaaatatgcaaacattttaagcaattttttaattaaaaaaaattcgacctccaagattaaatcattagatgtggttaacactgtttctggattggtaagtttccacaaaaagaggtttttaaatttttaaccacatagaccactctttaccatattcattattcttagtattcattgtggtgagttctctctttttaccacgtttatagttgttggattgggaagtgcagtgtgactcttactttgtagtttttaaatcttaacaagtttatagttgtatgagctaaaagtttaaacctctgccccattttcttggggcagtgttctgtgaccagttacatttttggacttaggttatctctgaagtgctgtgttgctgtataaatgtcatatggaggataacctacaaaatacacttcggatctcccaacagctttgcggttctgaaacagccttcagtagtaccactgaaaagaaacggggaattaactggttttttgtttcttttatagagatgagggtctcgctatgttgcccaggctggtctcaagctcctggcatgaaatgatcctcctgccttggcctcccaaagtgccgggattataggcatgagccactgttcccggcctagaattaaacagtttatatatgctctaaaatttaagtcagtgatcaagttgtttatactgtggatttatgtcacatggatattacttgatatgaataataactaaatgaacatgactgttagatgatcaccttttactttaatcaagaattgaagttttattttttctaaatagatacatataaaatgaatggaatttattccctctccccagattttatttggattctaaaatggaattattacatcaaaagataaggtatttttaagaagtatagttgtttttttgagactgagtcttgctctaacgcccaggctggtgtgcagtggtgcgatctcagctcactgcaacctttgcctcccaggttcaagcgattctcctgcctcagcttcccaactagctaggactgcaggtgtgcgccaccacacctggctaattttttgtgtttctagtagaggtggtttcaccttgttggccagggtggtctcgaattcctgacctcaggcgatctacctgtctcggcctcccaaagtgctgggattacagacttgaaccaccacacccagccatgaagtatagttttttgtttgttttttgagttttgcttttgttgcccaggctggagtgcaatggtgcgatcttggctcaccgcaacctctgcctcccgggttcaagcgattctcctgcctcagcctcctgagtagctgggattacaggcatgcaccaccacacactgctaattttgtaattttagtagagatagggtttcttcgtgttggtcaggctggtctcgagctccagacctcaggtgatccccccgccttggcctcccaaagtgctggaattacaggcgtgagccatcgcacccggcttttttttttgttttgagaccgagtcttgctctgttgcccaggctggagtgcagtggcacgatctcggctcactgccacctccgcctcctaggtacaagtgattctcttgcctcagcctcccc

SEQ ID NO: 566 - DNA, 4045 bp, Homo sapiens
tgctgtataaatgtcatatggaggataacctacaaaatacacttcggatctcccaacagctttgcggttctgaaacagccttcagtagtaccactgaaaagaaacggggaattaactggttttttgtttcttttatagagatgagggtctcgctatgttgcccaggctggtctcaagctcctggcatgaaatgatcctcctgccttggcctcccaaagtgccgggattataggcatgagccactgttcccggcctagaattaaacagtttatatatgctctaaaatttaagtcagtgatcaagttgtttatactgtggatttatgtcacatggatattacttgatatgaataataactaaatgaacatgactgttagatgatcaccttttactttaatcaagaattgaagttttattttttctaaatagatacatataaaatgaatggaatttattccctctccccagattttatttggattctaaaatggaattattacatcaaaagataaggtatttttaagaagtatagttgtttttttgagactgagtcttgctctaacgcccaggctggtgtgcagtggtgcgatctcagctcactgcaacctttgcctcccaggttcaagcgattctcctgcctcagcttcccaactagctaggactgcaggtgtgcgccaccacacctggctaattttttgtgtttctagtagaggtggtttcaccttgttggccagggtggtctcgaattcctgacctcaggcgatctacctgtctcggcctcccaaagtgctgggattacagacttgaaccaccacacccagccatgaagtatagttttttgtttgttttttgagttttgcttttgttgcccaggctggagtgcaatggtgcgatcttggctcaccgcaacctctgcctcccgggttcaagcgattctcctgcctcagcctcctgagtagctgggattacaggcatgcaccaccacacactgctaattttgtaattttagtagagatagggtttcttcgtgttggtcaggctggtctcgagctccagacctcaggtgatccccccgccttggcctcccaaagtgctggaattacaggcgtgagccatcgcacccggcttttttttttgttttgagaccgagtcttgctctgttgcccaggctggagtgcagtggcacgatctcggctcactgccacctccgcctcctaggtacaagtgattctcttgcctcagcctccccagtaggtgggattactgacacacatcaccatgcccaggtaatttttttgtatttttagtagagacggggtttcgccatgtcggccaggctggtctggaactcctgacctcaggtgatctgcccgcctcagcctcccaaagtgttgggattacaggtgtgagccactgtgcccagctgaagtatagttttgactttcaagaattcttatgaacaagacatagccagttgtttatataattgcattttctaccgtttatttctagagaaagaaaatagattttgtctatcataatccctttagtgctagccacttttttttttttttttttttgagttttcgctcttgctgcccaggctggagtgcaatggcatgcagtacactcacggctcactgcaacctttgcctccccaggttcaagtgattctcttgcctcagcctcctgagtagctgggattacaggcacctaccaccatgtccagctaattttttgtatttttagtagagatggggtttcgccatgttgggcaggttggtctggaactcttgacctcaggtgatcgcctgccttggcctcccaaagtgctgggattacaggcctgagccaccatgctcggccagtgctagccactttttaaaaaagtgacattaagcctaaaaagacacattctaacgtgccatttctcttctaggttttggcttggtttgaagaaggtgaagaaacaattacagcctttgtagaaccttttgtaattttactcatattagtagccaatgcaattgtgggtgtatggcaggtaagcaaaaattcctgtactgcaaaatttcaataagttatgtaagtgattagggctgtattaatctttctgttatctgtttttcctgatgtgttgagtaaaaatatgtttgcgggaagtttacatgtattttccctttattccataaattaattgttttctgacacagtctcactctgttgcccaggctggagtgcaatggtgttgtctcggctcactgcaacctcttcctcccaggttcaagtggttctcgtgcctcagcctcccaagtagctgggactacaggcacgcaccaccacgcccagctcatttttgtattttttggtaagagacagggtttcaccatgttggccaggctggtcttgagctcctgacctcaagtgatccgccctcctcagcctcccaaagtgctgggattacagacgtgagccaccatgcccggcctattaatttaattaattgcaaatttttgaccttaatgcatataaactttgcagttaagattgctcattcttcgccaagtgtggtggcaccagcctgtagtctcagctactcaggaggctgaggtgggagggttgcttgaacccaggaggtcaagactgtagtgagccatgatcgtaacactgcactccagtctgggcaaaggagcaacactgtctcagaaaaacattgttcattctttacggtagcaaggaattaaaatgggtgagagaagctgcttaaggaaatgagaatgtgagaaccattatctttatgtctcctagttgcttcctgtgacaaactttaaaagctacatgtcatttttattctccttgggtttttttggtaggtttagctataaaaattgtttccccttcagtgcttactacagactctgagacttaaaattcatgttaagtgttgatcttttaggtatttgacggatataatcacccctttgaggactgaagtagaccttttttttgtttttgttttgagaccgactctctgtcgcccaggcaggagtgcagtggcacgatctcggctcactgcaacctccgcctcccaggttcaagcagttctgcctcagcctccttgagtagctgggattacaggcacctgacaccacacccagctaatttttgtatttttagtagagacggggtttcaccatcaggctggtctcaaacccctgacctcgtgatccacccacctcggcctcccaaagtgctgggattacaggtgtgagccaccactcccggcctttttttttttttttttttttgtttgtttgtttgtttgtttgttttgaccgactttcactcttgttgcccaggctggagtgcaatggtgcagtcttggctcactgcaacctccacttcccgggatcaagcaattctcctgtctcaccctcccgggtagctgggattacaggcacgtgccaccatgcccagctaacttacttacttttaatagagatggggtttcattttgttggtcaggctggtctcaaactcctgacctcagatgattccccctgccttggcctcccaaagtgctaggattacatgcgtgagccaccacgcccgacacatcttataaacatacttagtcctgttgaaattgtaaacttctaatctttaccaataaatgttaacgatctttatgtggtaggttcatagaaagatggcctacttagagatttgtaattgtgccatatatatgtgtgtgtgtgtgtgtgtgtgtgtgtgtgtgtgtgtgtatatatttttttttttttttttttttttttagatggagtcttgctctgttgcccaggctggagtgcagtggtgtgattttggctcactgcaacctccgtcttgtgggtttgaacaattctcctgcctcagcttcccgagtagctgggattataggtgactgtcaccatgcctggctgttgttttttttgtttttttgagacagagtctcactctgtcacccaggctggagtgcagtggcatgatcttggctcactgcaag

SEQ ID NO: 567 - DNA, 4046 bp, Homo sapiens
acagagctagacttcgtctcagaaaaaaaagattcgagtttttaaaaaaagaacattcttaagtctttagtatactgaatggtatgagcagcaatagagggttgtggccttctgaaagtaaggaaaattataatgacagtataaggtagtatgaggggcatagtcttttatttctgaccagtgtcatcaaggagggctttattttttttaagacggagtctcgctctgtcaaccaggctggagtgcagtggcacgatcttggcccactgcagcctccacctcccggactcaagagattctcccacctcagtctcccaagtagctgggattacaggcgtgcaccaccacgcctggttaattttttgtatttttagtagagacagtttcaccatgttggccaggctggtctcgcactcccaacctcaggcgatccgcccacctcagcctcccaaagtgccgggattacaggtgtgagccaccatgcccagccttttcattgattgtaattgtcatctttgttctcagggtcagagataatttatcttttttttcccccaagacagcttcactcttgcccaggctggagtgcagtgtcataatcacagctcactccaatctctgcctcgcaggcttagtgatcctcccacctcagcctcctgagcagctgagactgcaggtgtatggcaccatgtcaggataatttttgcatttttcgtagagacactgtctcgttatgttcagcccaggttggtctggaactcttgggctcaagcagtcctcttacctcagcctcccaaaagtgctgggattacaggcatgagctactgtgctcagctgataatttaagcacatgcaaaatacagtgctcatgggatatttgtttaaccttgagcagtccagttaaattccacccaacatgatcttgaagggtaagaatgtctgatatgagattgaaattaactttatcatgaatttcccaattaaggtttttttatactttttctggggtatatacatcaaaactgaggtacacgtgttaccagctttcatctttgtgtcatttgattctctttaggctggtttgattctacaacttccattctgaaatcgggaagaaaattactgtgacttctaacggttgatagttcatatatgatgtcatgagaaatatatagcttgggactggcagtgctatgatgagagtccagccattcattggtctttacaactggagggatagttcttagaatttgtgagagatactcatcactcatagcatttactgtgtgcccaaacacaatctaagcatgttacatatgacttcttatcctcacaaaccttgaggtaggaactgttagtgttgtcattttatagacagtaaacttgtgtgttgtgtaacctctctacagtgacatagctgttaagagcctgtattgaacctgggcagcttagcccagagttgggttgggttggggttttttttgttttgttttgttttgtttttttgacatagtctctttctgttgcccaggctggagtgcagtggcaggatctcgtctcactgcagcctccgcctctcgggttcaagcgattcttctgcctcagcctcctgagcccagactattaagctgtactgcctctcatgagacagaattgattttaaatggcagggggatttggctaaaggtgaaagctgtgttttacagtcttagggacagcagagtctgtaattgcttttcctcattgttttatccccttagcttaattgagggtacttaacgtttcgtttttaatacaaattaataaatgtccttgtgtctgttgccttagatgtgaattgtttagtacaaatgttactggtgggcttcctttctttttaaagattagacctctaacattttattccttgggttagaaataattgcagtgtcaggcaggtctttactactcttctgttttcttttatacaggaaagaaatgctgaaaatgccatcgaagcccttaaggaatatgagcctgaaatgggcaaagtgtatcgacaggacagaaagagtgtgcagcggattaaagctaaagacatagttcctggtgatattgtagaaattgctggtgagttgagtttgtcatttttcttttattctagatagtatttctgaatgtagtccttttctcaaggctcataattatatttaaaataattgttttcatgtatcaattaacacattttattgccattcatacaaatcctacattctctaaaattattttgaaatgttttagcacctcccttcctgtcattgataaggcttttggtttttgtttttaaacaaggtattttgaattctacttgtttaaatacattgtagaacacaagtgctagagaggtaaaacctaatgttgatttgacagttagttatagtgaacaatttgttagaatactggctaatgacgacacagtttttcctgttttgtttcttggcaccaaagttcatggtcaagggtaatttcttgactctgaaagctatgcttggccaggcttggtagctcacgcctgtaatcccagcactttgggatgccgaggcaggcagatcacgaggtcaagagattgagaccaccctggccaacatgaaacctcatctctactaaaaatgcaaaaattagccgggcatgatggtgtgtgcctgtagtcccagccacttgtgaggctgcagcaggaagaatcgcttgaacctgggaggcggaggttgcagtgagctgagatcgcaccactgcactccatcttgatgacagagtgagacttcatctcaaaaaaaaaaaaaaaaaacagtatgcttaaaaatacttatgtgttacactgagccaggagtctctgcctgaattccagagatagcttcaaagagtccatgaatccactgtgagtccagaatgctccacagacctccaagggtcagtatcctcactgctgtagattagtgctgtttttttgttttgttttgttttgttttttgagatgggagtctcactctgttacccgggctggagtgcagtggcatgatctcagctcactgcaacctccacctcccaagctcaagcgatcctcccactttgccccccaaatagctggtaccacagatgcatgccactacactcgcctaatttttatattttttgtagagagggagttttgccatgttgctcaggctagtctcaaactcctgagctcaagtgatcctgccttagcgtcccaaagtgctgggattacaggtgtgcccagcagccatatttctgacagtccaaaatcacaacacccctgggaccaaccaggatagtctaggtgggttgtttgttttggctatttcacttagagagtcattgcatactgttattcagattatctggcttttcatacccttctgagttaagtatactatttactttgttgctatttgtgaattatctcatagtaatatgcttttatattgacttgggaagggtgtgctttgtctttattgtcttactcattttaatgaattgaaagagctgcattccttaacccatgctctacaactttggcctctgaaaggaaattgccttgtcctattctctcatccagaaatttttgttgttcctccagaaaaaaaggatagtgttacatatatgccagtaagccaattatttgggactgtgtagtgtttgtgtgtaaatggtgtgtgtaaatgatttaacagcttccttaagtatagtgttaagaagagtacaactcagaatgaaatgtcttggctattggattttttaaaacttcctgttttggccaggcgtggtggctcatgcctgtaatcccagcactttgggaggctgaggtgggcagatcatgaggtcaagagatcgaaactatcctggccaaaatggtgaaaccctgtctctactgaaaatacagaaatcagctgggcatggtggctcccacctgtagtccgagctcctcgggaggctgaggcaggagaatctcttaaacccaggaggcagaggttgcagtgagccgaggtcgt

SEQ ID NO: 568 - DNA, 4046 bp, Homo sapiens
ttttgaaaagcagctaatgtcatggagacagttatatgagtaacctggctctattttttttggtattgtttctttataaatagcttacttattaaaattctcattagcaacaacaagctggaggccaattaagccataaaatgttggagaaatggttgggttatatgtgtgaaattctcatagtgtgccctaaagacgtagttgccatttaaaaaaaatttttttttttttgaggcggagtctcgctctgttgcccaggctatagtgtagtgctgtgatctcagctcactgcaacctctgcctcctggattcaagctgttctcctgcctcagccacctgagtgtctgggattataggcgtgcgccaccatgcccagcttatttttgtatttttagtagagacggggtttcactgtgttggtcaggctggtctcgaactcctgatctcatgatccgcctgccttggcctcccaaagtgctgggattacaggcatttaaaaactttttaggctggtcacggtggctcatgcctgtaatttcaggactttgggaggctgcggcagtaggatcacttgtggccaagagtttgagagagcagttatagtctctataatgaaaatctttttttttttttttttaaagacagagttgcactctgtggcccagtggcgcgatctcagctcagtgcagcctctgcttccggggttcaagtaattctcatgcctcagcctccctagtagctgaaattacaggcatgcaccaccacacctggctaattgtatttttagtagagatagggttttgccatgttgtccaggctggtcttgacctcctgacctgaagtgatcgcccgcctcaaacccccaaagtgctgggattacagacataagtcatcacacccagcctataataaaaaactttaaaagtttaaaaaaaaatttaaacttcatagaggttctcgaatattatctttctttcattaagaaatcataatgtagtttttggctaacttgtggaaccaatttttttggtcaaatattgagagtgaagtttgctacctgtaacttaaagtaacatttagagacatattttactcagattgaccctaattatatatctatgacatgatttttaaattgaaatcagctgggcatggtgtctcatgcctgtaatcccagcactttgggaggccgaggtggggggatcacctcaggtcaggagtttgagaccagccttggccaacatagcaaaacctgtctctactaaaaatacaaaaattagctgggcatggtggcacatgcctgtaatcccagctacttgggaggctgaggctggaaaattgcccgggaggcagaggtttcagtaagccaagattgtgccactggactccagcctgggcaacaaagcaagactccgtctcaaaaaaaaaaaaaaagtagttctttatttaccatgcgatctttccagtacacttgctaattgctactccagagcatagccagatgtggcccacacctgtaattccagcactttgaggaggacaagatgagcaaattgtttgagtccacgagttggagaccaccctgggcaacatggtaaaacctcatctctacaaaaaaataccaaaaaaattaacccggcgtggtattgggtgcctgtaatcccagctattcaggaagccaagttgggaagattgcttgagcccaggaagttgaggctgtagtgagttgtgatggtgccattgcaccagcccgggtgatagagcaagacctctgtctcgaaaaaaaaaaaaagtatcagtatatatgttaaagtatttattaaagtatacaacaaatatatgtaaataatacagtcacagtatcagagtataaaatgattactgaaaaataaattaatttgaatagttactccagaaaataatcaatggggattctacttgaaaattcacttttttattttggaattgtgttgatttttatcctgacaccctttgttctggtattaatttccattactaagttttcccagcttacctcctttgaatgaattgggccttttgccaaccttttctcacactaacagtatcccaagagtggtaatgggtgggcatgaatgagaggttctaggttcttggtgtgggtcgcagagatctgttttttctgtctcacaacccgcttaggtgaatctgtctctgtcatcaagcacactgatcccgtccctgacccacgagctgtcaaccaagataaaaagaacatgctgttttctgtaagtactttatgaaatgtgtttttatttacagacatttccaaagcctaatcaaatgttatgtttttcactgccaaccatcactggctatcattctaaaggataatcacacttttcatggtcagtcttaggtgtcagaatatggcagtaacataacgtgtgacttagatgtcttttaattggcaagttttgggggaccaaaaaataatgactagcttatacatcttcaaactcttacctgcaaacatagttgaaaagtagatttgtttggaaaagccttagccaataaagggtattttcaaaatgatgtagatgacagctgctatttgtatgtggttcacaataaaaaggtgcgtgtttagagagagagagaaagcaaacatggcaaaccattaataatggtgagtctaggtgcaaagtatatgaatgttcattttactatttcactttttctattgatgtgaaaaattctttgaatagtgaggaaatgattttaagttggggacatttgtgggtttgtatgagaacctgactactacccatagtaagtaaatagaggtaccctgaaaatagtgaagccatgtccttctcttataacactaggaattaaagtggcatgggagagactgctcacatttgatttctttggtttttggaccctgtcacatgagtaggggttgtcaagatagcccatggggctagttgccgtttctattacagtgagaaaagtaggggccttgagttgttggagccagaagtggagaatgcttagagttgaactatatgagtttgaaaaattgggaacacagaggggttaagagcactgcttgaagatggtctgcaagccgggctcaaatagaaatctaggtgggtcagtacagagctgcctgacataagtaagtagcacatggagcattgcttgttgtcacagttgtatggctggttgcttgaacagtagccagtggaagacctagtagaatgtgtagagaatctgggtgccctagtcaaaaaccagcgtcggtatttaagttgggatgtggtattcatcttgtgaccagttctctacttctgtcctagggtacaaacattgctgctgggaaagctatgggagtggtggtagcaactggagttaacaccgaaattggcaagatccgggatgaaatggtggcaacagaacaggagagaacaccccttcagcaaaaactagatgaatttggggaacagctttccaaagtcatctcccttatttgcattgcagtctggatcataaatattgggcacttcaatgacccggttcatggagggtcctggatcagaggtgctatttactactttaaaattgcagtggccctggctgtagcagccattcctgaaggtctgcctgcagtcatcaccacctgcctggctcttggaactcgcagaatggcaaagaaaaatgccattgttcgaagcctcccgtctgtggaaacccttggttgtacttctgttatctgctcagacaagactggtacacttacaacaaaccagatgtcagtctgcagggtaagaggagtaatttagaatattccgtgtcgtggttctttgttcatcctaccaatatgccttcatgccatcaaaacttttgatttgtaatttcatacatttctgtgggctgtatgtatagcctgagcttaatttctaatatttgagaggatctaatcatttaattcctaaaactttcacaaaatacaggatatctgtatggctgatatacttgtattagatgtaagagaattagag

SEQ ID NO: 569 - DNA, 4047 bp, Homo sapiens
gccaagattgtgccactggactccagcctgggcaacaaagcaagactccgtctcaaaaaaaaaaaaaaagtagttctttatttaccatgcgatctttccagtacacttgctaattgctactccagagcatagccagatgtggcccacacctgtaattccagcactttgaggaggacaagatgagcaaattgtttgagtccacgagttggagaccaccctgggcaacatggtaaaacctcatctctacaaaaaaataccaaaaaaattaacccggcgtggtattgggtgcctgtaatcccagctattcaggaagccaagttgggaagattgcttgagcccaggaagttgaggctgtagtgagttgtgatggtgccattgcaccagcccgggtgatagagcaagacctctgtctcgaaaaaaaaaaaaagtatcagtatatatgttaaagtatttattaaagtatacaacaaatatatgtaaataatacagtcacagtatcagagtataaaatgattactgaaaaataaattaatttgaatagttactccagaaaataatcaatggggattctacttgaaaattcacttttttattttggaattgtgttgatttttatcctgacaccctttgttctggtattaatttccattactaagttttcccagcttacctcctttgaatgaattgggccttttgccaaccttttctcacactaacagtatcccaagagtggtaatgggtgggcatgaatgagaggttctaggttcttggtgtgggtcgcagagatctgttttttctgtctcacaacccgcttaggtgaatctgtctctgtcatcaagcacactgatcccgtccctgacccacgagctgtcaaccaagataaaaagaacatgctgttttctgtaagtactttatgaaatgtgtttttatttacagacatttccaaagcctaatcaaatgttatgtttttcactgccaaccatcactggctatcattctaaaggataatcacacttttcatggtcagtcttaggtgtcagaatatggcagtaacataacgtgtgacttagatgtcttttaattggcaagttttgggggaccaaaaaataatgactagcttatacatcttcaaactcttacctgcaaacatagttgaaaagtagatttgtttggaaaagccttagccaataaagggtattttcaaaatgatgtagatgacagctgctatttgtatgtggttcacaataaaaaggtgcgtgtttagagagagagagaaagcaaacatggcaaaccattaataatggtgagtctaggtgcaaagtatatgaatgttcattttactatttcactttttctattgatgtgaaaaattctttgaatagtgaggaaatgattttaagttggggacatttgtgggtttgtatgagaacctgactactacccatagtaagtaaatagaggtaccctgaaaatagtgaagccatgtccttctcttataacactaggaattaaagtggcatgggagagactgctcacatttgatttctttggtttttggaccctgtcacatgagtaggggttgtcaagatagcccatggggctagttgccgtttctattacagtgagaaaagtaggggccttgagttgttggagccagaagtggagaatgcttagagttgaactatatgagtttgaaaaattgggaacacagaggggttaagagcactgcttgaagatggtctgcaagccgggctcaaatagaaatctaggtgggtcagtacagagctgcctgacataagtaagtagcacatggagcattgcttgttgtcacagttgtatggctggttgcttgaacagtagccagtggaagacctagtagaatgtgtagagaatctgggtgccctagtcaaaaaccagcgtcggtatttaagttgggatgtggtattcatcttgtgaccagttctctacttctgtcctagggtacaaacattgctgctgggaaagctatgggagtggtggtagcaactggagttaacaccgaaattggcaagatccgggatgaaatggtggcaacagaacaggagagaacaccccttcagcaaaaactagatgaatttggggaacagctttccaaagtcatctcccttatttgcattgcagtctggatcataaatattgggcacttcaatgacccggttcatggagggtcctggatcagaggtgctatttactactttaaaattgcagtggccctggctgtagcagccattcctgaaggtctgcctgcagtcatcaccacctgcctggctcttggaactcgcagaatggcaaagaaaaatgccattgttcgaagcctcccgtctgtggaaacccttggttgtacttctgttatctgctcagacaagactggtacacttacaacaaaccagatgtcagtctgcagggtaagaggagtaatttagaatattccgtgtcgtggttctttgttcatcctaccaatatgccttcatgccatcaaaacttttgatttgtaatttcatacatttctgtgggctgtatgtatagcctgagcttaatttctaatatttgagaggatctaatcatttaattcctaaaactttcacaaaatacaggatatctgtatggctgatatacttgtattagatgtaagagaattagagaaattatattttcctttaattaaaaaaaaaaaaagcctgggcgcagtggctcacgcctgtaatcccagcactttgagaggccgaggcgggtggatcacctgaggtccgaagtttgagaccaacctgaccaaaatggtgaaaccctgtctctaccgaaaagacaaaaattagctgagtggtggcgtgcacctgtagtcccagctactcgagaggctgagacaggagaattgcttgaacctgggcagcggaggttgcagtgagccaagatcacaccactgctctcaattctgggcgacaagcaagactccatctcaaagaaaagaaaagaaaaaagacaaggtctcattctgttgcccaggctagtgtgcagtgacacagctgtggctcacttacagcctcaacctcccaggctcaagtcctcccaccccagcctcacaagtagctgcaaccacaagtgcatgccaccatgccccactagtttttttatttttttttgtagaggcaggttctcactatgtcaccaggctggtcttgaattcctgggctcaagtgatcctcctgccttggcctcccaaagagctgggattataagcatgaaccaccacactcagcctcctttctaattttcctgatcctctgtctctaggtgtatgttaatagacaagttctagagaaagctgctagttaacctccctacctgaagtcctaattggtttttctatcacatgttgaatgaagcgtgctttttctcaaaaagtagatagtcatctctctgtattcattagagattggttccaggacctccctcagataccaaactctgcagatgctcaagtctctgaaatgaaatggttcagtacttgcatataaccttgttcatcctccagtatacttgaaaacatctccagattacttacagtacctaacgtaatattataaatgatatgtaaatagttaaactgtgttgtttagggatagttaacctgtgttgtttagggaataatgacaagaaaaaaatgtacatgttcagtacagatgcagttattttttccatctgctgtttagttgaccgtggatgtggaacccacaggtacagagggctgactaaaattgcttttaacttgctttattctgtgtattcatcatatatatttttgtttgtttgtttgttcttgttttgagatggagtttcactcttgttgcccaggctgtagtgcaatggcccgatctcagctcactacaacctccgccttctgggttcaagcaattctcctgcttcagcctcccaagtagctgggattacaggcatgcgcccccacgcccggctaattttttgtatttttagtagagatagggtttctccatg

SEQ ID NO: 570 - DNA, 4046 bp, Homo sapiens
ctactccagagcatagccagatgtggcccacacctgtaattccagcactttgaggaggacaagatgagcaaattgtttgagtccacgagttggagaccaccctgggcaacatggtaaaacctcatctctacaaaaaaataccaaaaaaattaacccggcgtggtattgggtgcctgtaatcccagctattcaggaagccaagttgggaagattgcttgagcccaggaagttgaggctgtagtgagttgtgatggtgccattgcaccagcccgggtgatagagcaagacctctgtctcgaaaaaaaaaaaaagtatcagtatatatgttaaagtatttattaaagtatacaacaaatatatgtaaataatacagtcacagtatcagagtataaaatgattactgaaaaataaattaatttgaatagttactccagaaaataatcaatggggattctacttgaaaattcacttttttattttggaattgtgttgatttttatcctgacaccctttgttctggtattaatttccattactaagttttcccagcttacctcctttgaatgaattgggccttttgccaaccttttctcacactaacagtatcccaagagtggtaatgggtgggcatgaatgagaggttctaggttcttggtgtgggtcgcagagatctgttttttctgtctcacaacccgcttaggtgaatctgtctctgtcatcaagcacactgatcccgtccctgacccacgagctgtcaaccaagataaaaagaacatgctgttttctgtaagtactttatgaaatgtgtttttatttacagacatttccaaagcctaatcaaatgttatgtttttcactgccaaccatcactggctatcattctaaaggataatcacacttttcatggtcagtcttaggtgtcagaatatggcagtaacataacgtgtgacttagatgtcttttaattggcaagttttgggggaccaaaaaataatgactagcttatacatcttcaaactcttacctgcaaacatagttgaaaagtagatttgtttggaaaagccttagccaataaagggtattttcaaaatgatgtagatgacagctgctatttgtatgtggttcacaataaaaaggtgcgtgtttagagagagagagaaagcaaacatggcaaaccattaataatggtgagtctaggtgcaaagtatatgaatgttcattttactatttcactttttctattgatgtgaaaaattctttgaatagtgaggaaatgattttaagttggggacatttgtgggtttgtatgagaacctgactactacccatagtaagtaaatagaggtaccctgaaaatagtgaagccatgtccttctcttataacactaggaattaaagtggcatgggagagactgctcacatttgatttctttggtttttggaccctgtcacatgagtaggggttgtcaagatagcccatggggctagttgccgtttctattacagtgagaaaagtaggggccttgagttgttggagccagaagtggagaatgcttagagttgaactatatgagtttgaaaaattgggaacacagaggggttaagagcactgcttgaagatggtctgcaagccgggctcaaatagaaatctaggtgggtcagtacagagctgcctgacataagtaagtagcacatggagcattgcttgttgtcacagttgtatggctggttgcttgaacagtagccagtggaagacctagtagaatgtgtagagaatctgggtgccctagtcaaaaaccagcgtcggtatttaagttgggatgtggtattcatcttgtgaccagttctctacttctgtcctagggtacaaacattgctgctgggaaagctatgggagtggtggtagcaactggagttaacaccgaaattggcaagatccgggatgaaatggtggcaacagaacaggagagaacaccccttcagcaaaaactagatgaatttggggaacagctttccaaagtcatctcccttatttgcattgcagtctggatcataaatattgggcacttcaatgacccggttcatggagggtcctggatcagaggtgctatttactactttaaaattgcagtggccctggctgtagcagccattcctgaaggtctgcctgcagtcatcaccacctgcctggctcttggaactcgcagaatggcaaagaaaaatgccattgttcgaagcctcccgtctgtggaaacccttggttgtacttctgttatctgctcagacaagactggtacacttacaacaaaccagatgtcagtctgcagggtaagaggagtaatttagaatattccgtgtcgtggttctttgttcatcctaccaatatgccttcatgccatcaaaacttttgatttgtaatttcatacatttctgtgggctgtatgtatagcctgagcttaatttctaatatttgagaggatctaatcatttaattcctaaaactttcacaaaatacaggatatctgtatggctgatatacttgtattagatgtaagagaattagagaaattatattttcctttaattaaaaaaaaaaaaagcctgggcgcagtggctcacgcctgtaatcccagcactttgagaggccgaggcgggtggatcacctgaggtccgaagtttgagaccaacctgaccaaaatggtgaaaccctgtctctaccgaaaagacaaaaattagctgagtggtggcgtgcacctgtagtcccagctactcgagaggctgagacaggagaattgcttgaacctgggcagcggaggttgcagtgagccaagatcacaccactgctctcaattctgggcgacaagcaagactccatctcaaagaaaagaaaagaaaaaagacaaggtctcattctgttgcccaggctagtgtgcagtgacacagctgtggctcacttacagcctcaacctcccaggctcaagtcctcccaccccagcctcacaagtagctgcaaccacaagtgcatgccaccatgccccactagtttttttatttttttttgtagaggcaggttctcactatgtcaccaggctggtcttgaattcctgggctcaagtgatcctcctgccttggcctcccaaagagctgggattataagcatgaaccaccacactcagcctcctttctaattttcctgatcctctgtctctaggtgtatgttaatagacaagttctagagaaagctgctagttaacctccctacctgaagtcctaattggtttttctatcacatgttgaatgaagcgtgctttttctcaaaaagtagatagtcatctctctgtattcattagagattggttccaggacctccctcagataccaaactctgcagatgctcaagtctctgaaatgaaatggttcagtacttgcatataaccttgttcatcctccagtatacttgaaaacatctccagattacttacagtacctaacgtaatattataaatgatatgtaaatagttaaactgtgttgtttagggatagttaacctgtgttgtttagggaataatgacaagaaaaaaatgtacatgttcagtacagatgcagttattttttccatctgctgtttagttgaccgtggatgtggaacccacaggtacagagggctgactaaaattgcttttaacttgctttattctgtgtattcatcatatatatttttgtttgtttgtttgttcttgttttgagatggagtttcactcttgttgcccaggctgtagtgcaatggcccgatctcagctcactacaacctccgccttctgggttcaagcaattctcctgcttcagcctcccaagtagctgggattacaggcatgcgcccccacgcccggctaattttttgtatttttagtagagatagggtttctccatgttggtcaggctggtctcgaactcgcgacctcaagtgatccacccgcttttgaaagcctcccaaagtgctgggattataggcgtgagcccccgcgcccggccatcctatatttttt

SEQ ID NO: 571 - DNA, 4085 bp, Homo sapiens
gtgagttgtgatggtgccattgcaccagcccgggtgatagagcaagacctctgtctcgaaaaaaaaaaaaagtatcagtatatatgttaaagtatttattaaagtatacaacaaatatatgtaaataatacagtcacagtatcagagtataaaatgattactgaaaaataaattaatttgaatagttactccagaaaataatcaatggggattctacttgaaaattcacttttttattttggaattgtgttgatttttatcctgacaccctttgttctggtattaatttccattactaagttttcccagcttacctcctttgaatgaattgggccttttgccaaccttttctcacactaacagtatcccaagagtggtaatgggtgggcatgaatgagaggttctaggttcttggtgtgggtcgcagagatctgttttttctgtctcacaacccgcttaggtgaatctgtctctgtcatcaagcacactgatcccgtccctgacccacgagctgtcaaccaagataaaaagaacatgctgttttctgtaagtactttatgaaatgtgtttttatttacagacatttccaaagcctaatcaaatgttatgtttttcactgccaaccatcactggctatcattctaaaggataatcacacttttcatggtcagtcttaggtgtcagaatatggcagtaacataacgtgtgacttagatgtcttttaattggcaagttttgggggaccaaaaaataatgactagcttatacatcttcaaactcttacctgcaaacatagttgaaaagtagatttgtttggaaaagccttagccaataaagggtattttcaaaatgatgtagatgacagctgctatttgtatgtggttcacaataaaaaggtgcgtgtttagagagagagagaaagcaaacatggcaaaccattaataatggtgagtctaggtgcaaagtatatgaatgttcattttactatttcactttttctattgatgtgaaaaattctttgaatagtgaggaaatgattttaagttggggacatttgtgggtttgtatgagaacctgactactacccatagtaagtaaatagaggtaccctgaaaatagtgaagccatgtccttctcttataacactaggaattaaagtggcatgggagagactgctcacatttgatttctttggtttttggaccctgtcacatgagtaggggttgtcaagatagcccatggggctagttgccgtttctattacagtgagaaaagtaggggccttgagttgttggagccagaagtggagaatgcttagagttgaactatatgagtttgaaaaattgggaacacagaggggttaagagcactgcttgaagatggtctgcaagccgggctcaaatagaaatctaggtgggtcagtacagagctgcctgacataagtaagtagcacatggagcattgcttgttgtcacagttgtatggctggttgcttgaacagtagccagtggaagacctagtagaatgtgtagagaatctgggtgccctagtcaaaaaccagcgtcggtatttaagttgggatgtggtattcatcttgtgaccagttctctacttctgtcctagggtacaaacattgctgctgggaaagctatgggagtggtggtagcaactggagttaacaccgaaattggcaagatccgggatgaaatggtggcaacagaacaggagagaacaccccttcagcaaaaactagatgaatttggggaacagctttccaaagtcatctcccttatttgcattgcagtctggatcataaatattgggcacttcaatgacccggttcatggagggtcctggatcagaggtgctatttactactttaaaattgcagtggccctggctgtagcagccattcctgaaggtctgcctgcagtcatcaccacctgcctggctcttggaactcgcagaatggcaaagaaaaatgccattgttcgaagcctcccgtctgtggaaacccttggttgtacttctgttatctgctcagacaagactggtacacttacaacaaaccagatgtcagtctgcagggtaagaggagtaatttagaatattccgtgtcgtggttctttgttcatcctaccaatatgccttcatgccatcaaaacttttgatttgtaatttcatacatttctgtgggctgtatgtatagcctgagcttaatttctaatatttgagaggatctaatcatttaattcctaaaactttcacaaaatacaggatatctgtatggctgatatacttgtattagatgtaagagaattagagaaattatattttcctttaattaaaaaaaaaaaaagcctgggcgcagtggctcacgcctgtaatcccagcactttgagaggccgaggcgggtggatcacctgaggtccgaagtttgagaccaacctgaccaaaatggtgaaaccctgtctctaccgaaaagacaaaaattagctgagtggtggcgtgcacctgtagtcccagctactcgagaggctgagacaggagaattgcttgaacctgggcagcggaggttgcagtgagccaagatcacaccactgctctcaattctgggcgacaagcaagactccatctcaaagaaaagaaaagaaaaaagacaaggtctcattctgttgcccaggctagtgtgcagtgacacagctgtggctcacttacagcctcaacctcccaggctcaagtcctcccaccccagcctcacaagtagctgcaaccacaagtgcatgccaccatgccccactagtttttttatttttttttgtagaggcaggttctcactatgtcaccaggctggtcttgaattcctgggctcaagtgatcctcctgccttggcctcccaaagagctgggattataagcatgaaccaccacactcagcctcctttctaattttcctgatcctctgtctctaggtgtatgttaatagacaagttctagagaaagctgctagttaacctccctacctgaagtcctaattggtttttctatcacatgttgaatgaagcgtgctttttctcaaaaagtagatagtcatctctctgtattcattagagattggttccaggacctccctcagataccaaactctgcagatgctcaagtctctgaaatgaaatggttcagtacttgcatataaccttgttcatcctccagtatacttgaaaacatctccagattacttacagtacctaacgtaatattataaatgatatgtaaatagttaaactgtgttgtttagggatagttaacctgtgttgtttagggaataatgacaagaaaaaaatgtacatgttcagtacagatgcagttattttttccatctgctgtttagttgaccgtggatgtggaacccacaggtacagagggctgactaaaattgcttttaacttgctttattctgtgtattcatcatatatatttttgtttgtttgtttgttcttgttttgagatggagtttcactcttgttgcccaggctgtagtgcaatggcccgatctcagctcactacaacctccgccttctgggttcaagcaattctcctgcttcagcctcccaagtagctgggattacaggcatgcgcccccacgcccggctaattttttgtatttttagtagagatagggtttctccatgttggtcaggctggtctcgaactcgcgacctcaagtgatccacccgcttttgaaagcctcccaaagtgctgggattataggcgtgagcccccgcgcccggccatcctatattttttgaccatcatttgataaaataaataatttaaacctgctgttagaaaagtaacaactgaataaataatgcaataattatacagctggattattttgtataattcactttccttaggttttgcttaaacaacttggtacaagtctattccaaaaggtacacatgactcatacagagtagacatttgtcacatattttattcggctcattaattagcaagggaatctgtatttgaggaagtgttcaatattagaatattagaatagggattgctaggttagat

SEQ ID NO: 572 - DNA, 4046 bp, Homo sapiens
agccgagtcgtgccattgcagtccacccagcctaggcgacagagtgaaactccacctcaaaaaaaaaaaaaagttattttaaaataaagattaactaatttccttattgaatgtgagatgaattgctctgaaaagatgtgtttttaaaacacaacatagctttgttgttgctgttattacggagttttgctctgtcgcccaggctagagtgcagtggcgcaatctcagcccactgcaacctctgcctcccgggttcaagcacttctctccctcaacctcctgagtagctgggattacaggtgcccaccaccacgcccggctaatttgttatatttttagtagagacgggtttcaccatctttgccaggctgatcttgagctcctgtcctcatgatctactcaccttggcctctcagtgctgggattataggcgtgagccaccgtgcccagctcaacgtggcctgtttaacttgagttttacattttttaaattccccttagagaatgatttgatcagattattaattgctcatatttcagagaaagcacgagaaaatatagttttgacatcactttctgtaattttttctttttagaggaggttttacaagttttcatttgcaatgaaaacacaagcctaaatcttacttttccaaactgggcttctgaattataatttgtgaatgcaaatcaagcagtggaaaaattatctttaagaaaatagcttatgtcgctttaaaaaataaaattaatcctttcctaagcatgcttccatctgtattgtctagggaacatcaattcattcagctctgcgggctccttactgtatacatatagttatgcagcttcatagaacatgagctattgccacaataaaaataagtgggaaggagcagagaagcagtttgtcttattttactcgggaaatgtttatgcaactctgaaatgtgagtttattcttcccaagcttttgtgcttagctctaaggcaggactacctaataccactctcacagccagccatttgaaatttgggattctgagcaatctaaagagtaacttgtctctggaactgaccttttgctgaccgggagtcctcataacttggattttgtgtgggttgttgtgtctttggtgccactgctgctcattcattcagcacctcagtgatgctgtttttcatactgttcgattggtcgggggtgtgatgggcgaagcagtctaatataattaagctagttagggtaagggacagtactgctgatgctgagtgagcctcagtgagttttattaaagttgttttcgtaaatgaaagaggttgtttgcctttgtcctaagctaacaaaggtagtttatttgtgtagcattttttaaaaatcccttttaaatactctgatgcgctctccccctacagatgttcattctggacagagtggaaggtgatacttgttcccttaatgagtttaccataactggatcaacttatgcacctattggagaagtgtgagtaaccctcctcctcatttaaaggatctggtgtggcagtttagtatttgtattgatttgcagcatgtctacaaagttaagacagctttctgaatgtggctcaagtcaacacttattactaaagtagtaaatgtttttaaaacaaaaactttgaaagatgaaccaaaggttataatccagtcatctttttgcatcttctgggctccaaactttcaagagggatttgtgtttgttattcactgtagccagtggtggaagaattgaattaagaatttctggtctttttactgattgatttctgataccagagatgcattctctcttttgtttttgtctaatattggctctggcatcaaattgtttggaattttttccagtatgttgtcccagaaattctgttttcattattaaacaattgcgggggggcagggggcgggaggaatcaatagtggcgaccataccctgctctaagagtgttttctctttgggcaggcataaagatgataaaccagtgaattgtcaccagtatgatggtctggtagaattagcaacaatttgtgctctttgtaatgactctgctttggattacaatgaggtaagtctcttcataaattagaaggaatggctgttcctagttcaagggtggggtgggtggaatgaaagtctagcctgccttcctcccttttgaaagtcaagggtgcctgattttgtttcccccttccattcagaacctgatggtggggccagcatgacctcaccaaagaaagctgagagcctttcacatatcctctgtgactgagcattgcagttagttaacttaaagttgtagtatatgtgatgttctttctgttgatagcatacttactataaatgaataaaacccaggatagaaaatgctttcctgaaagcaaaggatatagtttctgtctcaaaggtaagctagtccctgtcagagacagaatgtgaactcttcagaatgataagcagtgacatggaattacattattatgtgaaggcactctttgaattaatagtgtgatcagtggcttcttatatttgggtgaaataataaatactgtgtttgatgtcatcttatatttaagggaaatgaaaaacctacttattagaataagatcacatgcacacctgtactttgagtatgtttttaattatctgggtcacctgtttcagaggaggataaaaatggccttacagtgttgtaatagaggacagattgtgcttttgtggaaaaaaaatattaaagataaatttatctgtgtacttctcccttttttctactttctgtgcctttaaccaatacaggcaaagggtgtgtatgaaaaagttggagaagctacagagactgctctcacttgcctagtagagaagatgaatgtatttgataccgaattgaagggtctttctaaaatagaacgtgcaaatgcctgcaactcagtgagtatttgaacctggtttattgttcatgctgcttatcagtcgtactatatatacttagtgtctgcactgtcctactctcttagaaaactaattataccttatctcctcaaacttacagtatttccttccccatattcactctcaggtaagatgctcttcctgtgtatttgaccaggaaaataaaagcaatcaatagctaatttccttgagcgaccctctgggcccacaggggctgccttctcccatagtgctgtgaacagtgttcttgctcctagcagaagccacctcctcccaacatctttgctgcattattgatttccatctctactagatgttcttcagcatagggggaaataatagtgtctttctatcttgaaactttcctttgaccttatttcccctgtcagctaccacactttcttttcctgttcaattaaaccttttttttttttttttttttgagacagagtttctctctgtcaccagattggagtgccatggcgcgatcttggctcactgcaacctccacctcccaggttcaagcgattctcctgccttagcctccctagtagctgggattacaggcacacgccaccacgcctggctaattttttgtatttttcgtagaaaggggtttcaccatgctagccaggctggtctcgaactcctgacctcaggtgatccgcccacctcggcctcccaaagtgctgggattacaggcatgagccaccgcgcctgggcatcaaacatttcttaactcatttgatgagaccagcataaccaaataccaaaggtcaatgtggtgatggtggtggcagtggcagtggcagtggcagagggcacccacattgttcatgtatacactgaacaaataagtggcctctgagcctttttctgcctgtcagagtctttgagacagggctcattcgaccagcatcactatgacaagggccagtagcaaggatggggagtctccacagtgagttggacctgagtgaggttcctctcaaagagctgctgctccctcctgccaagaccaccatactggacctgtcctgcagtactgcccttagatttctgtgg

SEQ ID NO: 573 - DNA, 4045 bp, Homo sapiens
gcttcatagaacatgagctattgccacaataaaaataagtgggaaggagcagagaagcagtttgtcttattttactcgggaaatgtttatgcaactctgaaatgtgagtttattcttcccaagcttttgtgcttagctctaaggcaggactacctaataccactctcacagccagccatttgaaatttgggattctgagcaatctaaagagtaacttgtctctggaactgaccttttgctgaccgggagtcctcataacttggattttgtgtgggttgttgtgtctttggtgccactgctgctcattcattcagcacctcagtgatgctgtttttcatactgttcgattggtcgggggtgtgatgggcgaagcagtctaatataattaagctagttagggtaagggacagtactgctgatgctgagtgagcctcagtgagttttattaaagttgttttcgtaaatgaaagaggttgtttgcctttgtcctaagctaacaaaggtagtttatttgtgtagcattttttaaaaatcccttttaaatactctgatgcgctctccccctacagatgttcattctggacagagtggaaggtgatacttgttcccttaatgagtttaccataactggatcaacttatgcacctattggagaagtgtgagtaaccctcctcctcatttaaaggatctggtgtggcagtttagtatttgtattgatttgcagcatgtctacaaagttaagacagctttctgaatgtggctcaagtcaacacttattactaaagtagtaaatgtttttaaaacaaaaactttgaaagatgaaccaaaggttataatccagtcatctttttgcatcttctgggctccaaactttcaagagggatttgtgtttgttattcactgtagccagtggtggaagaattgaattaagaatttctggtctttttactgattgatttctgataccagagatgcattctctcttttgtttttgtctaatattggctctggcatcaaattgtttggaattttttccagtatgttgtcccagaaattctgttttcattattaaacaattgcgggggggcagggggcgggaggaatcaatagtggcgaccataccctgctctaagagtgttttctctttgggcaggcataaagatgataaaccagtgaattgtcaccagtatgatggtctggtagaattagcaacaatttgtgctctttgtaatgactctgctttggattacaatgaggtaagtctcttcataaattagaaggaatggctgttcctagttcaagggtggggtgggtggaatgaaagtctagcctgccttcctcccttttgaaagtcaagggtgcctgattttgtttcccccttccattcagaacctgatggtggggccagcatgacctcaccaaagaaagctgagagcctttcacatatcctctgtgactgagcattgcagttagttaacttaaagttgtagtatatgtgatgttctttctgttgatagcatacttactataaatgaataaaacccaggatagaaaatgctttcctgaaagcaaaggatatagtttctgtctcaaaggtaagctagtccctgtcagagacagaatgtgaactcttcagaatgataagcagtgacatggaattacattattatgtgaaggcactctttgaattaatagtgtgatcagtggcttcttatatttgggtgaaataataaatactgtgtttgatgtcatcttatatttaagggaaatgaaaaacctacttattagaataagatcacatgcacacctgtactttgagtatgtttttaattatctgggtcacctgtttcagaggaggataaaaatggccttacagtgttgtaatagaggacagattgtgcttttgtggaaaaaaaatattaaagataaatttatctgtgtacttctcccttttttctactttctgtgcctttaaccaatacaggcaaagggtgtgtatgaaaaagttggagaagctacagagactgctctcacttgcctagtagagaagatgaatgtatttgataccgaattgaagggtctttctaaaatagaacgtgcaaatgcctgcaactcagtgagtatttgaacctggtttattgttcatgctgcttatcagtcgtactatatatacttagtgtctgcactgtcctactctcttagaaaactaattataccttatctcctcaaacttacagtatttccttccccatattcactctcaggtaagatgctcttcctgtgtatttgaccaggaaaataaaagcaatcaatagctaatttccttgagcgaccctctgggcccacaggggctgccttctcccatagtgctgtgaacagtgttcttgctcctagcagaagccacctcctcccaacatctttgctgcattattgatttccatctctactagatgttcttcagcatagggggaaataatagtgtctttctatcttgaaactttcctttgaccttatttcccctgtcagctaccacactttcttttcctgttcaattaaaccttttttttttttttttttttgagacagagtttctctctgtcaccagattggagtgccatggcgcgatcttggctcactgcaacctccacctcccaggttcaagcgattctcctgccttagcctccctagtagctgggattacaggcacacgccaccacgcctggctaattttttgtatttttcgtagaaaggggtttcaccatgctagccaggctggtctcgaactcctgacctcaggtgatccgcccacctcggcctcccaaagtgctgggattacaggcatgagccaccgcgcctgggcatcaaacatttcttaactcatttgatgagaccagcataaccaaataccaaaggtcaatgtggtgatggtggtggcagtggcagtggcagtggcagagggcacccacattgttcatgtatacactgaacaaataagtggcctctgagcctttttctgcctgtcagagtctttgagacagggctcattcgaccagcatcactatgacaagggccagtagcaaggatggggagtctccacagtgagttggacctgagtgaggttcctctcaaagagctgctgctccctcctgccaagaccaccatactggacctgtcctgcagtactgcccttagatttctgtggcctcacaagcccggggagcctagacctcagtagaaacactttgcaacggctgctggtgaagaatggccatccattgagtctctagcacctgggtctcctcaaaagactggtccccctgcctgtcacttggctcagcttaagaacttgaagtggaccaggcgcagtggctcacacctgtaatcccaacactttgggaagctgaggcgggagagtcacttgaggcctagagtttaggttgcagcatcactgcacttgagcctgggcaacagagtcagaccccatctcaaaaaaaaattaaggcctgaagtggctaaacttgaaggataactccctttatcttatcctggccaaagtggtagatgattgcttggatgagaagtgatatgcagataagatgttgcaatacacaaagtctgtgtgggtcagtcggtcacgtgggtgccaaggacaggtgggagagaagaagcaagctacagaagcagctcaagaatgggaactgcggaagctgattgtattggaggaaggagtgtgatgctctcagagcagccagggaggagcagaaggagcttagggacgtaagtcaggctctcaaagtctatgtctggttcctgcccccacaaaccaccacccaggaaacatcattcctgagctgtgtggcagcagcagcagctgctccttttatatggcagacagggtgattgcttgttgggcaagagccctcctacactatcttagagtgaataccctctatctgcagtccagggtctgcacagccacatggtcctctaataggtccaccagaccatttgcctgcaaacagcctcatcctcagtgcccactgtc

SEQ ID NO: 574 - DNA, 4042 bp, Homo sapiens
cctgagacggttcagtggctggcaggccagcaggatcgctgcagggccctgagccccatctagtcagttcatcagccttcagtcctcccgtagcttcctaggttagatgctgatgttcttggggatttctatgatgatttttaaatgtgtgtcagtgggagcaaatataattaactcaccacattaaccaaattaaggtggaaaaaacaataaggtcacctcagtaggtgcatatgatgaaacgcatcttatcacaccaaactaagactataaaagtgtgtctttaacgctgacagtgtgtttacacagagaccatgctaacataacagaattctcaccatttctatgcagtattatactggcattcctggtctgtgtaataggcaagaaaagtacaaaaactggaagagaaggggtatctttagttgtaggtaacgatataaagccaaaggtttattctcagtcttcgtcttcctattttgttggtgctgtcactcgctccctctttgaagcacctcttcacttggcttccacgatcccatacttgctctccctccctggcctctcattcgaggtctttgtagctgggtctttcacaaggcaccaggaggtgaaggctccatagtcctcagccatttctgtctatagttactcccatgatctcttctggtctcattactataatcagtagccactagctatctaaaactacttagaatacctaaaaacacttccttagatgccctagccatattcacttaaagtgcttatccatcacgtgtgacagccacatgaacagtggccacagagcattgccatctttcacagagttctggtggacagctctgcttggggccatctcttcacctccaacgttccctagtttaagtcagtgtcattatactgaatggtattccttgtctcccttcagccaatgcttttgttttttgagatggagtttgctctttcgtccagggtggagtgaagtggcgcaatctcatctcactggaatctctgcccccctggctttaagcagttctcctgcctcggcctcctgagtagctgggattacaggtgcctgccaccacacctagctaatttttgtagacagggtttcaccatgttggccaggctggtcatgaactgctgacctcaggtgatccactgcacccgaccaccttcagccaattcttgacaactggagcttgagaccctccgttgtcttctgttttacttgtcttaaaagccaaatgccccataatgacttttgaggtcttaatgacctgcttctaccatcctctgccattacctgcctcaccttttgctcatgtaaactctattccagccacgttggcactcctttaccattccaggacttgccaggttgcacttccgttctctgcctggtgggtcttcaccaccacccactgggttcacacacatcttttcaggccccatggggccatctttattcaaatgtcaccgccttctggccactttatgtaacagttcatatgtatgtatgcaaattttctatcccccttccctttttctctatagcacttgtgttacttttgcatcttagtctgtctctcccaaaataggggacaagtttcatgagggcaaaaacctgtctgttttgtttattgctatattcctagcatctgtcatgtaataggtgtgcttactgcttgttaggtaaaaaagttcagaaattgccacccagtagtatccatatttgttccctttgtaggtcattaaacagctgatgaaaaaggaattcactctagagttttcacgtgacagaaagtcaatgtcggtttactgtacaccaaataaaccaagcaggacatcaatgagcaagatgtttgtgaaggcaagtatggcagattgcaattgagatgttcttgccagggttaagatcccggtgaaccaataaaacaaaattgtttatctaaatctgtaacatttccagggtgctcctgaaggtgtcattgacaggtgcacccacattcgagttggaagtactaaggttcctatgacctctggagtcaaacagaagatcatgtctgtcattcgagagtggggtagtggcagcgacacactgcgatgcctggccctggccactcatgacaacccactgagaagagaagaaatgcaccttgaggactctgccaactttattaaatatgaggttagctaatgaaaagtttctttgtccacaccctgcacgattcattgtgtttaaacagtactccttcaagcaaaaggtcaaacagttctcacttttgccaagaaagaggtgtggttatttgtttttctgcctgccagctgtgtcacccttaaaatttgctgcttcaaacatacatagttaataatttcataaaagtgttattttcaaagtagaatattttcaaagtagaataatcaagatgagcttaagcttgtaaaccccattttgcctctcatctaaatcatgattttttttaaattggtgacatttctagaatattcattagttactgaaggtcaaaagatccaagttggagattacttccacttttctactcagagtagaattcttttatatcaaggatgtgacatcctaaagctatgaacaaaatgaagaagctttggtactgtgggctcagaatagcacaagagttaaagaatggtttgataacgggtgtagtggtatttttttttctcataagaaaatgcaaaaaccgccaggcacggtggctcaaatgcctgtaatctcagcactttgggaggccgaggctggcagatcacctggggttgggggtttgagaccagcctgaccaacatggagaaaccacatctctactaaaaatacaaaattagccaggtgtggtggcgcatacctgtagtcccagctaccctggaggctgaggcagaagagtctcttgaacctgggaggcggaggtcgcagtgagctgagattgcgccatggcactccagcctgggcaacaagagcgaaactccgcctcaaaaaaaaaaaaagaaaaaaaatgcagaaacctgtctcaatgtttaactgggcatttttcaaactaggggacaaaaactagaacttgccacttttatttaaagtgatgctcttattttagaccaatctgaccttcgttggctgcgtgggcatgctggatcctccgagaatcgaggtggcctcctccgtgaagctgtgccggcaagcaggcatccgggtcatcatgatcactggggacaacaagggcactgctgtggccatctgtcgccgcatcggcatcttcgggcaggatgaggacgtgacgtcaaaagctttcacaggccgggagtttgatgaactcaacccctccgcccagcgagacgcctgcctgaacgcccgctgttttgctcgagttgaaccctcccacaagtctaaaatcgtagaatttcttcagtcttttgatgagattacagctatggtgagcatgtttgaacatgtacaggtgactcaggctacacaagcacatagtagcctctaattttgaccactgaatttttttgtcatagctccctaatttggaatttgtcatgatttgggtcttttctctagaattcggtgaatcagtggttagcatgttgtgtgctacttgcagggaagatcctagagtcgtttaaaacccagaagggccttccagatcagtcccagaggaacaatctggtgatctagtctcttttttaaatgagacgtgtttttattgtaagttttctgaaaattgaggatgtaatcagtcagttgtttggatcaccctgcttttaagttctttaagagctggctattgatgaagcatttccagtattcttcccctcacctgattttcacccagatacattatgttaaatttactttcttctcttttaaaaaaaaatcttagttttgaaacatactataagtgtactctcctctcccccagaggtaactgaagttggaatttagcaaaaatattaaaaacatgggagtgctgtttttgtgtctgtagacagtattatttttgca

SEQ ID NO: 575 - DNA, 4046 bp, Homo sapiens
gtcagtgggagcaaatataattaactcaccacattaaccaaattaaggtggaaaaaacaataaggtcacctcagtaggtgcatatgatgaaacgcatcttatcacaccaaactaagactataaaagtgtgtctttaacgctgacagtgtgtttacacagagaccatgctaacataacagaattctcaccatttctatgcagtattatactggcattcctggtctgtgtaataggcaagaaaagtacaaaaactggaagagaaggggtatctttagttgtaggtaacgatataaagccaaaggtttattctcagtcttcgtcttcctattttgttggtgctgtcactcgctccctctttgaagcacctcttcacttggcttccacgatcccatacttgctctccctccctggcctctcattcgaggtctttgtagctgggtctttcacaaggcaccaggaggtgaaggctccatagtcctcagccatttctgtctatagttactcccatgatctcttctggtctcattactataatcagtagccactagctatctaaaactacttagaatacctaaaaacacttccttagatgccctagccatattcacttaaagtgcttatccatcacgtgtgacagccacatgaacagtggccacagagcattgccatctttcacagagttctggtggacagctctgcttggggccatctcttcacctccaacgttccctagtttaagtcagtgtcattatactgaatggtattccttgtctcccttcagccaatgcttttgttttttgagatggagtttgctctttcgtccagggtggagtgaagtggcgcaatctcatctcactggaatctctgcccccctggctttaagcagttctcctgcctcggcctcctgagtagctgggattacaggtgcctgccaccacacctagctaatttttgtagacagggtttcaccatgttggccaggctggtcatgaactgctgacctcaggtgatccactgcacccgaccaccttcagccaattcttgacaactggagcttgagaccctccgttgtcttctgttttacttgtcttaaaagccaaatgccccataatgacttttgaggtcttaatgacctgcttctaccatcctctgccattacctgcctcaccttttgctcatgtaaactctattccagccacgttggcactcctttaccattccaggacttgccaggttgcacttccgttctctgcctggtgggtcttcaccaccacccactgggttcacacacatcttttcaggccccatggggccatctttattcaaatgtcaccgccttctggccactttatgtaacagttcatatgtatgtatgcaaattttctatcccccttccctttttctctatagcacttgtgttacttttgcatcttagtctgtctctcccaaaataggggacaagtttcatgagggcaaaaacctgtctgttttgtttattgctatattcctagcatctgtcatgtaataggtgtgcttactgcttgttaggtaaaaaagttcagaaattgccacccagtagtatccatatttgttccctttgtaggtcattaaacagctgatgaaaaaggaattcactctagagttttcacgtgacagaaagtcaatgtcggtttactgtacaccaaataaaccaagcaggacatcaatgagcaagatgtttgtgaaggcaagtatggcagattgcaattgagatgttcttgccagggttaagatcccggtgaaccaataaaacaaaattgtttatctaaatctgtaacatttccagggtgctcctgaaggtgtcattgacaggtgcacccacattcgagttggaagtactaaggttcctatgacctctggagtcaaacagaagatcatgtctgtcattcgagagtggggtagtggcagcgacacactgcgatgcctggccctggccactcatgacaacccactgagaagagaagaaatgcaccttgaggactctgccaactttattaaatatgaggttagctaatgaaaagtttctttgtccacaccctgcacgattcattgtgtttaaacagtactccttcaagcaaaaggtcaaacagttctcacttttgccaagaaagaggtgtggttatttgtttttctgcctgccagctgtgtcacccttaaaatttgctgcttcaaacatacatagttaataatttcataaaagtgttattttcaaagtagaatattttcaaagtagaataatcaagatgagcttaagcttgtaaaccccattttgcctctcatctaaatcatgattttttttaaattggtgacatttctagaatattcattagttactgaaggtcaaaagatccaagttggagattacttccacttttctactcagagtagaattcttttatatcaaggatgtgacatcctaaagctatgaacaaaatgaagaagctttggtactgtgggctcagaatagcacaagagttaaagaatggtttgataacgggtgtagtggtatttttttttctcataagaaaatgcaaaaaccgccaggcacggtggctcaaatgcctgtaatctcagcactttgggaggccgaggctggcagatcacctggggttgggggtttgagaccagcctgaccaacatggagaaaccacatctctactaaaaatacaaaattagccaggtgtggtggcgcatacctgtagtcccagctaccctggaggctgaggcagaagagtctcttgaacctgggaggcggaggtcgcagtgagctgagattgcgccatggcactccagcctgggcaacaagagcgaaactccgcctcaaaaaaaaaaaaagaaaaaaaatgcagaaacctgtctcaatgtttaactgggcatttttcaaactaggggacaaaaactagaacttgccacttttatttaaagtgatgctcttattttagaccaatctgaccttcgttggctgcgtgggcatgctggatcctccgagaatcgaggtggcctcctccgtgaagctgtgccggcaagcaggcatccgggtcatcatgatcactggggacaacaagggcactgctgtggccatctgtcgccgcatcggcatcttcgggcaggatgaggacgtgacgtcaaaagctttcacaggccgggagtttgatgaactcaacccctccgcccagcgagacgcctgcctgaacgcccgctgttttgctcgagttgaaccctcccacaagtctaaaatcgtagaatttcttcagtcttttgatgagattacagctatggtgagcatgtttgaacatgtacaggtgactcaggctacacaagcacatagtagcctctaattttgaccactgaatttttttgtcatagctccctaatttggaatttgtcatgatttgggtcttttctctagaattcggtgaatcagtggttagcatgttgtgtgctacttgcagggaagatcctagagtcgtttaaaacccagaagggccttccagatcagtcccagaggaacaatctggtgatctagtctcttttttaaatgagacgtgtttttattgtaagttttctgaaaattgaggatgtaatcagtcagttgtttggatcaccctgcttttaagttctttaagagctggctattgatgaagcatttccagtattcttcccctcacctgattttcacccagatacattatgttaaatttactttcttctcttttaaaaaaaaatcttagttttgaaacatactataagtgtactctcctctcccccagaggtaactgaagttggaatttagcaaaaatattaaaaacatgggagtgctgtttttgtgtctgtagacagtattatttttgcatgcttttgaaggcatattttttggccgagtgcagtggctcatgcctgtaaccccaacacttgggaggccgaggcaggtgaatcacttggggtcaggagttcaagaccagcctggccaacatggtgaaaccccgtctgtactaaaaatacaaaaa

SEQ ID NO: 576 - DNA, 4031 bp, Homo sapiens
gttgtcttctgttttacttgtcttaaaagccaaatgccccataatgacttttgaggtcttaatgacctgcttctaccatcctctgccattacctgcctcaccttttgctcatgtaaactctattccagccacgttggcactcctttaccattccaggacttgccaggttgcacttccgttctctgcctggtgggtcttcaccaccacccactgggttcacacacatcttttcaggccccatggggccatctttattcaaatgtcaccgccttctggccactttatgtaacagttcatatgtatgtatgcaaattttctatcccccttccctttttctctatagcacttgtgttacttttgcatcttagtctgtctctcccaaaataggggacaagtttcatgagggcaaaaacctgtctgttttgtttattgctatattcctagcatctgtcatgtaataggtgtgcttactgcttgttaggtaaaaaagttcagaaattgccacccagtagtatccatatttgttccctttgtaggtcattaaacagctgatgaaaaaggaattcactctagagttttcacgtgacagaaagtcaatgtcggtttactgtacaccaaataaaccaagcaggacatcaatgagcaagatgtttgtgaaggcaagtatggcagattgcaattgagatgttcttgccagggttaagatcccggtgaaccaataaaacaaaattgtttatctaaatctgtaacatttccagggtgctcctgaaggtgtcattgacaggtgcacccacattcgagttggaagtactaaggttcctatgacctctggagtcaaacagaagatcatgtctgtcattcgagagtggggtagtggcagcgacacactgcgatgcctggccctggccactcatgacaacccactgagaagagaagaaatgcaccttgaggactctgccaactttattaaatatgaggttagctaatgaaaagtttctttgtccacaccctgcacgattcattgtgtttaaacagtactccttcaagcaaaaggtcaaacagttctcacttttgccaagaaagaggtgtggttatttgtttttctgcctgccagctgtgtcacccttaaaatttgctgcttcaaacatacatagttaataatttcataaaagtgttattttcaaagtagaatattttcaaagtagaataatcaagatgagcttaagcttgtaaaccccattttgcctctcatctaaatcatgattttttttaaattggtgacatttctagaatattcattagttactgaaggtcaaaagatccaagttggagattacttccacttttctactcagagtagaattcttttatatcaaggatgtgacatcctaaagctatgaacaaaatgaagaagctttggtactgtgggctcagaatagcacaagagttaaagaatggtttgataacgggtgtagtggtatttttttttctcataagaaaatgcaaaaaccgccaggcacggtggctcaaatgcctgtaatctcagcactttgggaggccgaggctggcagatcacctggggttgggggtttgagaccagcctgaccaacatggagaaaccacatctctactaaaaatacaaaattagccaggtgtggtggcgcatacctgtagtcccagctaccctggaggctgaggcagaagagtctcttgaacctgggaggcggaggtcgcagtgagctgagattgcgccatggcactccagcctgggcaacaagagcgaaactccgcctcaaaaaaaaaaaaagaaaaaaaatgcagaaacctgtctcaatgtttaactgggcatttttcaaactaggggacaaaaactagaacttgccacttttatttaaagtgatgctcttattttagaccaatctgaccttcgttggctgcgtgggcatgctggatcctccgagaatcgaggtggcctcctccgtgaagctgtgccggcaagcaggcatccgggtcatcatgatcactggggacaacaagggcactgctgtggccatctgtcgccgcatcggcatcttcgggcaggatgaggacgtgacgtcaaaagctttcacaggccgggagtttgatgaactcaacccctccgcccagcgagacgcctgcctgaacgcccgctgttttgctcgagttgaaccctcccacaagtctaaaatcgtagaatttcttcagtcttttgatgagattacagctatggtgagcatgtttgaacatgtacaggtgactcaggctacacaagcacatagtagcctctaattttgaccactgaatttttttgtcatagctccctaatttggaatttgtcatgatttgggtcttttctctagaattcggtgaatcagtggttagcatgttgtgtgctacttgcagggaagatcctagagtcgtttaaaacccagaagggccttccagatcagtcccagaggaacaatctggtgatctagtctcttttttaaatgagacgtgtttttattgtaagttttctgaaaattgaggatgtaatcagtcagttgtttggatcaccctgcttttaagttctttaagagctggctattgatgaagcatttccagtattcttcccctcacctgattttcacccagatacattatgttaaatttactttcttctcttttaaaaaaaaatcttagttttgaaacatactataagtgtactctcctctcccccagaggtaactgaagttggaatttagcaaaaatattaaaaacatgggagtgctgtttttgtgtctgtagacagtattatttttgcatgcttttgaaggcatattttttggccgagtgcagtggctcatgcctgtaaccccaacacttgggaggccgaggcaggtgaatcacttggggtcaggagttcaagaccagcctggccaacatggtgaaaccccgtctgtactaaaaatacaaaaaattgctgggtgtggtggtgggcgcctgtaatcccagctactcgggagattgaggcaggagaatcgcttgaacccaggaggcgtgcagtgagccgagactgcgccactgcactacagcctgggcgacagagcgggactccatctcagaaaaataaaaatttgcatatttttgcaatctgcatctttctacttgaaatttatccatgtggatacaagtgcttcctcttgactgccacataggttgtgtttttgtttttagtaagataatacagataaatttgaagtcccctttgtcccacttcggtaaacttatttggtaattttacatttcctaggtaaaatgtgttttgtgacaccaacttatgaaacaaaaattctaaaactctttgccaagagacctacggctctattcattttcctcctgcttcccattcagtgggcttttgcctaggggtatgaatgtggcatgccagttggctgacccaaccattgctttccctttcagactggcgatggcgtgaacgatgctcctgctctgaagaaagccgagattggcattgctatgggctctggcactgcggtggctaaaaccgcctctgagatggtcctggcggatgacaacttctccaccattgtggctgccgttgaggaggggcgggcaatctacaacaacatgaaacagttcatccgctacctcatctcgtccaacgtcggggaagttgtctggtaggtctctgtgacagcatcacttactgtacgcctttatctaaatgggtcatggagcccagttctcgcagtttgctctccagattgcagcagctttggtctttgtgcctgagttggaagaggggagtgggcaagacagaaatgccttatggaagcagtggtgctttggccctcgggagggttgtctgcagctgccccaatgtgcaaagaatcctctttaacgtgagactgagctaacattaaccaggtagtcacatgaaattcttgccctccaaaagttggctttatctcagtcagcttaataatttttttatttttatttatttt

SEQ ID NO: 577 - DNA, 4070 bp, Homo sapiens
cacgttggcactcctttaccattccaggacttgccaggttgcacttccgttctctgcctggtgggtcttcaccaccacccactgggttcacacacatcttttcaggccccatggggccatctttattcaaatgtcaccgccttctggccactttatgtaacagttcatatgtatgtatgcaaattttctatcccccttccctttttctctatagcacttgtgttacttttgcatcttagtctgtctctcccaaaataggggacaagtttcatgagggcaaaaacctgtctgttttgtttattgctatattcctagcatctgtcatgtaataggtgtgcttactgcttgttaggtaaaaaagttcagaaattgccacccagtagtatccatatttgttccctttgtaggtcattaaacagctgatgaaaaaggaattcactctagagttttcacgtgacagaaagtcaatgtcggtttactgtacaccaaataaaccaagcaggacatcaatgagcaagatgtttgtgaaggcaagtatggcagattgcaattgagatgttcttgccagggttaagatcccggtgaaccaataaaacaaaattgtttatctaaatctgtaacatttccagggtgctcctgaaggtgtcattgacaggtgcacccacattcgagttggaagtactaaggttcctatgacctctggagtcaaacagaagatcatgtctgtcattcgagagtggggtagtggcagcgacacactgcgatgcctggccctggccactcatgacaacccactgagaagagaagaaatgcaccttgaggactctgccaactttattaaatatgaggttagctaatgaaaagtttctttgtccacaccctgcacgattcattgtgtttaaacagtactccttcaagcaaaaggtcaaacagttctcacttttgccaagaaagaggtgtggttatttgtttttctgcctgccagctgtgtcacccttaaaatttgctgcttcaaacatacatagttaataatttcataaaagtgttattttcaaagtagaatattttcaaagtagaataatcaagatgagcttaagcttgtaaaccccattttgcctctcatctaaatcatgattttttttaaattggtgacatttctagaatattcattagttactgaaggtcaaaagatccaagttggagattacttccacttttctactcagagtagaattcttttatatcaaggatgtgacatcctaaagctatgaacaaaatgaagaagctttggtactgtgggctcagaatagcacaagagttaaagaatggtttgataacgggtgtagtggtatttttttttctcataagaaaatgcaaaaaccgccaggcacggtggctcaaatgcctgtaatctcagcactttgggaggccgaggctggcagatcacctggggttgggggtttgagaccagcctgaccaacatggagaaaccacatctctactaaaaatacaaaattagccaggtgtggtggcgcatacctgtagtcccagctaccctggaggctgaggcagaagagtctcttgaacctgggaggcggaggtcgcagtgagctgagattgcgccatggcactccagcctgggcaacaagagcgaaactccgcctcaaaaaaaaaaaaagaaaaaaaatgcagaaacctgtctcaatgtttaactgggcatttttcaaactaggggacaaaaactagaacttgccacttttatttaaagtgatgctcttattttagaccaatctgaccttcgttggctgcgtgggcatgctggatcctccgagaatcgaggtggcctcctccgtgaagctgtgccggcaagcaggcatccgggtcatcatgatcactggggacaacaagggcactgctgtggccatctgtcgccgcatcggcatcttcgggcaggatgaggacgtgacgtcaaaagctttcacaggccgggagtttgatgaactcaacccctccgcccagcgagacgcctgcctgaacgcccgctgttttgctcgagttgaaccctcccacaagtctaaaatcgtagaatttcttcagtcttttgatgagattacagctatggtgagcatgtttgaacatgtacaggtgactcaggctacacaagcacatagtagcctctaattttgaccactgaatttttttgtcatagctccctaatttggaatttgtcatgatttgggtcttttctctagaattcggtgaatcagtggttagcatgttgtgtgctacttgcagggaagatcctagagtcgtttaaaacccagaagggccttccagatcagtcccagaggaacaatctggtgatctagtctcttttttaaatgagacgtgtttttattgtaagttttctgaaaattgaggatgtaatcagtcagttgtttggatcaccctgcttttaagttctttaagagctggctattgatgaagcatttccagtattcttcccctcacctgattttcacccagatacattatgttaaatttactttcttctcttttaaaaaaaaatcttagttttgaaacatactataagtgtactctcctctcccccagaggtaactgaagttggaatttagcaaaaatattaaaaacatgggagtgctgtttttgtgtctgtagacagtattatttttgcatgcttttgaaggcatattttttggccgagtgcagtggctcatgcctgtaaccccaacacttgggaggccgaggcaggtgaatcacttggggtcaggagttcaagaccagcctggccaacatggtgaaaccccgtctgtactaaaaatacaaaaaattgctgggtgtggtggtgggcgcctgtaatcccagctactcgggagattgaggcaggagaatcgcttgaacccaggaggcgtgcagtgagccgagactgcgccactgcactacagcctgggcgacagagcgggactccatctcagaaaaataaaaatttgcatatttttgcaatctgcatctttctacttgaaatttatccatgtggatacaagtgcttcctcttgactgccacataggttgtgtttttgtttttagtaagataatacagataaatttgaagtcccctttgtcccacttcggtaaacttatttggtaattttacatttcctaggtaaaatgtgttttgtgacaccaacttatgaaacaaaaattctaaaactctttgccaagagacctacggctctattcattttcctcctgcttcccattcagtgggcttttgcctaggggtatgaatgtggcatgccagttggctgacccaaccattgctttccctttcagactggcgatggcgtgaacgatgctcctgctctgaagaaagccgagattggcattgctatgggctctggcactgcggtggctaaaaccgcctctgagatggtcctggcggatgacaacttctccaccattgtggctgccgttgaggaggggcgggcaatctacaacaacatgaaacagttcatccgctacctcatctcgtccaacgtcggggaagttgtctggtaggtctctgtgacagcatcacttactgtacgcctttatctaaatgggtcatggagcccagttctcgcagtttgctctccagattgcagcagctttggtctttgtgcctgagttggaagaggggagtgggcaagacagaaatgccttatggaagcagtggtgctttggccctcgggagggttgtctgcagctgccccaatgtgcaaagaatcctctttaacgtgagactgagctaacattaaccaggtagtcacatgaaattcttgccctccaaaagttggctttatctcagtcagcttaataatttttttatttttatttatttttttgagacagtctcgctgtcgcccaggcttcgggcagtggcacgatctcagctcactgtcccctccacctcctgggttcaagcctcccgaacagctgggattacaggcatgcgccaccactccctgccatttttttgtgttttagtagaaatgaggtttcaccatgtt

SEQ ID NO: 578 - DNA, 4048 bp, Homo sapiens
gggtttgagaccagcctgaccaacatggagaaaccacatctctactaaaaatacaaaattagccaggtgtggtggcgcatacctgtagtcccagctaccctggaggctgaggcagaagagtctcttgaacctgggaggcggaggtcgcagtgagctgagattgcgccatggcactccagcctgggcaacaagagcgaaactccgcctcaaaaaaaaaaaaagaaaaaaaatgcagaaacctgtctcaatgtttaactgggcatttttcaaactaggggacaaaaactagaacttgccacttttatttaaagtgatgctcttattttagaccaatctgaccttcgttggctgcgtgggcatgctggatcctccgagaatcgaggtggcctcctccgtgaagctgtgccggcaagcaggcatccgggtcatcatgatcactggggacaacaagggcactgctgtggccatctgtcgccgcatcggcatcttcgggcaggatgaggacgtgacgtcaaaagctttcacaggccgggagtttgatgaactcaacccctccgcccagcgagacgcctgcctgaacgcccgctgttttgctcgagttgaaccctcccacaagtctaaaatcgtagaatttcttcagtcttttgatgagattacagctatggtgagcatgtttgaacatgtacaggtgactcaggctacacaagcacatagtagcctctaattttgaccactgaatttttttgtcatagctccctaatttggaatttgtcatgatttgggtcttttctctagaattcggtgaatcagtggttagcatgttgtgtgctacttgcagggaagatcctagagtcgtttaaaacccagaagggccttccagatcagtcccagaggaacaatctggtgatctagtctcttttttaaatgagacgtgtttttattgtaagttttctgaaaattgaggatgtaatcagtcagttgtttggatcaccctgcttttaagttctttaagagctggctattgatgaagcatttccagtattcttcccctcacctgattttcacccagatacattatgttaaatttactttcttctcttttaaaaaaaaatcttagttttgaaacatactataagtgtactctcctctcccccagaggtaactgaagttggaatttagcaaaaatattaaaaacatgggagtgctgtttttgtgtctgtagacagtattatttttgcatgcttttgaaggcatattttttggccgagtgcagtggctcatgcctgtaaccccaacacttgggaggccgaggcaggtgaatcacttggggtcaggagttcaagaccagcctggccaacatggtgaaaccccgtctgtactaaaaatacaaaaaattgctgggtgtggtggtgggcgcctgtaatcccagctactcgggagattgaggcaggagaatcgcttgaacccaggaggcgtgcagtgagccgagactgcgccactgcactacagcctgggcgacagagcgggactccatctcagaaaaataaaaatttgcatatttttgcaatctgcatctttctacttgaaatttatccatgtggatacaagtgcttcctcttgactgccacataggttgtgtttttgtttttagtaagataatacagataaatttgaagtcccctttgtcccacttcggtaaacttatttggtaattttacatttcctaggtaaaatgtgttttgtgacaccaacttatgaaacaaaaattctaaaactctttgccaagagacctacggctctattcattttcctcctgcttcccattcagtgggcttttgcctaggggtatgaatgtggcatgccagttggctgacccaaccattgctttccctttcagactggcgatggcgtgaacgatgctcctgctctgaagaaagccgagattggcattgctatgggctctggcactgcggtggctaaaaccgcctctgagatggtcctggcggatgacaacttctccaccattgtggctgccgttgaggaggggcgggcaatctacaacaacatgaaacagttcatccgctacctcatctcgtccaacgtcggggaagttgtctggtaggtctctgtgacagcatcacttactgtacgcctttatctaaatgggtcatggagcccagttctcgcagtttgctctccagattgcagcagctttggtctttgtgcctgagttggaagaggggagtgggcaagacagaaatgccttatggaagcagtggtgctttggccctcgggagggttgtctgcagctgccccaatgtgcaaagaatcctctttaacgtgagactgagctaacattaaccaggtagtcacatgaaattcttgccctccaaaagttggctttatctcagtcagcttaataatttttttatttttatttatttttttgagacagtctcgctgtcgcccaggcttcgggcagtggcacgatctcagctcactgtcccctccacctcctgggttcaagcctcccgaacagctgggattacaggcatgcgccaccactccctgccatttttttgtgttttagtagaaatgaggtttcaccatgttgcccaggctggtctcttaactgctgagctcagccagtctgcccaccttggcttcccaaagtgctgggattacaggcataagccaccgcacctggcctcagtcatctgaatttaagtaataaactaagtaaaattgagctttaattcaaaattgggtataagtattttacagattacctgaagttgttgtcatttatttttctggaggagggcgggttgatgatgctctttaaatagtggccagaagtcatttgggctctctttgtcttcttttcttgattggaaacagtattttcctgacagcagcccttggatttcccgaggctttgattcctgttcagctgctctgggtcaatctggtgacagatggcctgcctgccactgcactggggttcaaccctcctgatctggacatcatgaataaacctccccggaacccaaaggaaccattgatcagcgggtggctctttttccgttacttggctattggctgtgagtacaatttttttatattactgatttttaaacaaaatgtttgtgagctgaaattttgtaaattcatcccttaaaagcgtgttttttcttctatccccgtatagggtagcaaaagacagagatgccctcttacagttcgatgaactatacatccaatttaccagagtcctttcacagttagttccagttttagcatcctgcccttacttgggcttttctgaatgagcaattaaacatcagggttttcagattgagccctctgtgcaaagggataagaatgattcacgctaggttctgccttccaagagttcataggtgggatttaaatagataattgtcaccaagttataaaatttagtccctgtttccataagagaagggttgcgcagtggctggtcccttttatatataaatcatctctttagccctcatcttcctcaccccgggttcttccccatttcatagattgggaaagtgaggtgaaatcacttccctgggatcccataggaaggcattgtgttttcataatatattcacatgacttcaaattcaaaaagcacacaatggcatagaatggaaagggtttgggccagtcacttccctctggcgttgaggtgctcatgtaccctgtgcccttccggagagattccagcatgctgtgcacacctgcatgttgacccttgtcttgccttcttcctgcttgtcagatccttccatatccggacatgcgtagtgcctcatccttgcagccagcggccttcatgctccactgtaattcgtgggttagtgggtatatgcacttgttgtttttgatgctaccacatggggatatttgcctcgtctgaactctgtgtattctctgctgcaccttgttgcttctttgcaataaacttcctgaactcaaagctaatactggggggaatcccagaagctgctgaggg

SEQ ID NO: 579 - DNA, 4066 bp, Homo sapiens
caacaagagcgaaactccgcctcaaaaaaaaaaaaagaaaaaaaatgcagaaacctgtctcaatgtttaactgggcatttttcaaactaggggacaaaaactagaacttgccacttttatttaaagtgatgctcttattttagaccaatctgaccttcgttggctgcgtgggcatgctggatcctccgagaatcgaggtggcctcctccgtgaagctgtgccggcaagcaggcatccgggtcatcatgatcactggggacaacaagggcactgctgtggccatctgtcgccgcatcggcatcttcgggcaggatgaggacgtgacgtcaaaagctttcacaggccgggagtttgatgaactcaacccctccgcccagcgagacgcctgcctgaacgcccgctgttttgctcgagttgaaccctcccacaagtctaaaatcgtagaatttcttcagtcttttgatgagattacagctatggtgagcatgtttgaacatgtacaggtgactcaggctacacaagcacatagtagcctctaattttgaccactgaatttttttgtcatagctccctaatttggaatttgtcatgatttgggtcttttctctagaattcggtgaatcagtggttagcatgttgtgtgctacttgcagggaagatcctagagtcgtttaaaacccagaagggccttccagatcagtcccagaggaacaatctggtgatctagtctcttttttaaatgagacgtgtttttattgtaagttttctgaaaattgaggatgtaatcagtcagttgtttggatcaccctgcttttaagttctttaagagctggctattgatgaagcatttccagtattcttcccctcacctgattttcacccagatacattatgttaaatttactttcttctcttttaaaaaaaaatcttagttttgaaacatactataagtgtactctcctctcccccagaggtaactgaagttggaatttagcaaaaatattaaaaacatgggagtgctgtttttgtgtctgtagacagtattatttttgcatgcttttgaaggcatattttttggccgagtgcagtggctcatgcctgtaaccccaacacttgggaggccgaggcaggtgaatcacttggggtcaggagttcaagaccagcctggccaacatggtgaaaccccgtctgtactaaaaatacaaaaaattgctgggtgtggtggtgggcgcctgtaatcccagctactcgggagattgaggcaggagaatcgcttgaacccaggaggcgtgcagtgagccgagactgcgccactgcactacagcctgggcgacagagcgggactccatctcagaaaaataaaaatttgcatatttttgcaatctgcatctttctacttgaaatttatccatgtggatacaagtgcttcctcttgactgccacataggttgtgtttttgtttttagtaagataatacagataaatttgaagtcccctttgtcccacttcggtaaacttatttggtaattttacatttcctaggtaaaatgtgttttgtgacaccaacttatgaaacaaaaattctaaaactctttgccaagagacctacggctctattcattttcctcctgcttcccattcagtgggcttttgcctaggggtatgaatgtggcatgccagttggctgacccaaccattgctttccctttcagactggcgatggcgtgaacgatgctcctgctctgaagaaagccgagattggcattgctatgggctctggcactgcggtggctaaaaccgcctctgagatggtcctggcggatgacaacttctccaccattgtggctgccgttgaggaggggcgggcaatctacaacaacatgaaacagttcatccgctacctcatctcgtccaacgtcggggaagttgtctggtaggtctctgtgacagcatcacttactgtacgcctttatctaaatgggtcatggagcccagttctcgcagtttgctctccagattgcagcagctttggtctttgtgcctgagttggaagaggggagtgggcaagacagaaatgccttatggaagcagtggtgctttggccctcgggagggttgtctgcagctgccccaatgtgcaaagaatcctctttaacgtgagactgagctaacattaaccaggtagtcacatgaaattcttgccctccaaaagttggctttatctcagtcagcttaataatttttttatttttatttatttttttgagacagtctcgctgtcgcccaggcttcgggcagtggcacgatctcagctcactgtcccctccacctcctgggttcaagcctcccgaacagctgggattacaggcatgcgccaccactccctgccatttttttgtgttttagtagaaatgaggtttcaccatgttgcccaggctggtctcttaactgctgagctcagccagtctgcccaccttggcttcccaaagtgctgggattacaggcataagccaccgcacctggcctcagtcatctgaatttaagtaataaactaagtaaaattgagctttaattcaaaattgggtataagtattttacagattacctgaagttgttgtcatttatttttctggaggagggcgggttgatgatgctctttaaatagtggccagaagtcatttgggctctctttgtcttcttttcttgattggaaacagtattttcctgacagcagcccttggatttcccgaggctttgattcctgttcagctgctctgggtcaatctggtgacagatggcctgcctgccactgcactggggttcaaccctcctgatctggacatcatgaataaacctccccggaacccaaaggaaccattgatcagcgggtggctctttttccgttacttggctattggctgtgagtacaatttttttatattactgatttttaaacaaaatgtttgtgagctgaaattttgtaaattcatcccttaaaagcgtgttttttcttctatccccgtatagggtagcaaaagacagagatgccctcttacagttcgatgaactatacatccaatttaccagagtcctttcacagttagttccagttttagcatcctgcccttacttgggcttttctgaatgagcaattaaacatcagggttttcagattgagccctctgtgcaaagggataagaatgattcacgctaggttctgccttccaagagttcataggtgggatttaaatagataattgtcaccaagttataaaatttagtccctgtttccataagagaagggttgcgcagtggctggtcccttttatatataaatcatctctttagccctcatcttcctcaccccgggttcttccccatttcatagattgggaaagtgaggtgaaatcacttccctgggatcccataggaaggcattgtgttttcataatatattcacatgacttcaaattcaaaaagcacacaatggcatagaatggaaagggtttgggccagtcacttccctctggcgttgaggtgctcatgtaccctgtgcccttccggagagattccagcatgctgtgcacacctgcatgttgacccttgtcttgccttcttcctgcttgtcagatccttccatatccggacatgcgtagtgcctcatccttgcagccagcggccttcatgctccactgtaattcgtgggttagtgggtatatgcacttgttgtttttgatgctaccacatggggatatttgcctcgtctgaactctgtgtattctctgctgcaccttgttgcttctttgcaataaacttcctgaactcaaagctaatactggggggaatcccagaagctgctgagggcagggccatgctgctcagtgttccaccctagctcctgacagcatttccctagaaaactgctgctgggcctctaatggagcaaataaatctgtgtacaactaggcagcaatagtttgtccaaaagtcctggtgtaatctagtccctcaaactgtgcagccttacatggagtacacacacacttgcagccttgaagtactaccca

SEQ ID NO: 580 - DNA, 4109 bp, Homo sapiens
tgagacgtgtttttattgtaagttttctgaaaattgaggatgtaatcagtcagttgtttggatcaccctgcttttaagttctttaagagctggctattgatgaagcatttccagtattcttcccctcacctgattttcacccagatacattatgttaaatttactttcttctcttttaaaaaaaaatcttagttttgaaacatactataagtgtactctcctctcccccagaggtaactgaagttggaatttagcaaaaatattaaaaacatgggagtgctgtttttgtgtctgtagacagtattatttttgcatgcttttgaaggcatattttttggccgagtgcagtggctcatgcctgtaaccccaacacttgggaggccgaggcaggtgaatcacttggggtcaggagttcaagaccagcctggccaacatggtgaaaccccgtctgtactaaaaatacaaaaaattgctgggtgtggtggtgggcgcctgtaatcccagctactcgggagattgaggcaggagaatcgcttgaacccaggaggcgtgcagtgagccgagactgcgccactgcactacagcctgggcgacagagcgggactccatctcagaaaaataaaaatttgcatatttttgcaatctgcatctttctacttgaaatttatccatgtggatacaagtgcttcctcttgactgccacataggttgtgtttttgtttttagtaagataatacagataaatttgaagtcccctttgtcccacttcggtaaacttatttggtaattttacatttcctaggtaaaatgtgttttgtgacaccaacttatgaaacaaaaattctaaaactctttgccaagagacctacggctctattcattttcctcctgcttcccattcagtgggcttttgcctaggggtatgaatgtggcatgccagttggctgacccaaccattgctttccctttcagactggcgatggcgtgaacgatgctcctgctctgaagaaagccgagattggcattgctatgggctctggcactgcggtggctaaaaccgcctctgagatggtcctggcggatgacaacttctccaccattgtggctgccgttgaggaggggcgggcaatctacaacaacatgaaacagttcatccgctacctcatctcgtccaacgtcggggaagttgtctggtaggtctctgtgacagcatcacttactgtacgcctttatctaaatgggtcatggagcccagttctcgcagtttgctctccagattgcagcagctttggtctttgtgcctgagttggaagaggggagtgggcaagacagaaatgccttatggaagcagtggtgctttggccctcgggagggttgtctgcagctgccccaatgtgcaaagaatcctctttaacgtgagactgagctaacattaaccaggtagtcacatgaaattcttgccctccaaaagttggctttatctcagtcagcttaataatttttttatttttatttatttttttgagacagtctcgctgtcgcccaggcttcgggcagtggcacgatctcagctcactgtcccctccacctcctgggttcaagcctcccgaacagctgggattacaggcatgcgccaccactccctgccatttttttgtgttttagtagaaatgaggtttcaccatgttgcccaggctggtctcttaactgctgagctcagccagtctgcccaccttggcttcccaaagtgctgggattacaggcataagccaccgcacctggcctcagtcatctgaatttaagtaataaactaagtaaaattgagctttaattcaaaattgggtataagtattttacagattacctgaagttgttgtcatttatttttctggaggagggcgggttgatgatgctctttaaatagtggccagaagtcatttgggctctctttgtcttcttttcttgattggaaacagtattttcctgacagcagcccttggatttcccgaggctttgattcctgttcagctgctctgggtcaatctggtgacagatggcctgcctgccactgcactggggttcaaccctcctgatctggacatcatgaataaacctccccggaacccaaaggaaccattgatcagcgggtggctctttttccgttacttggctattggctgtgagtacaatttttttatattactgatttttaaacaaaatgtttgtgagctgaaattttgtaaattcatcccttaaaagcgtgttttttcttctatccccgtatagggtagcaaaagacagagatgccctcttacagttcgatgaactatacatccaatttaccagagtcctttcacagttagttccagttttagcatcctgcccttacttgggcttttctgaatgagcaattaaacatcagggttttcagattgagccctctgtgcaaagggataagaatgattcacgctaggttctgccttccaagagttcataggtgggatttaaatagataattgtcaccaagttataaaatttagtccctgtttccataagagaagggttgcgcagtggctggtcccttttatatataaatcatctctttagccctcatcttcctcaccccgggttcttccccatttcatagattgggaaagtgaggtgaaatcacttccctgggatcccataggaaggcattgtgttttcataatatattcacatgacttcaaattcaaaaagcacacaatggcatagaatggaaagggtttgggccagtcacttccctctggcgttgaggtgctcatgtaccctgtgcccttccggagagattccagcatgctgtgcacacctgcatgttgacccttgtcttgccttcttcctgcttgtcagatccttccatatccggacatgcgtagtgcctcatccttgcagccagcggccttcatgctccactgtaattcgtgggttagtgggtatatgcacttgttgtttttgatgctaccacatggggatatttgcctcgtctgaactctgtgtattctctgctgcaccttgttgcttctttgcaataaacttcctgaactcaaagctaatactggggggaatcccagaagctgctgagggcagggccatgctgctcagtgttccaccctagctcctgacagcatttccctagaaaactgctgctgggcctctaatggagcaaataaatctgtgtacaactaggcagcaatagtttgtccaaaagtcctggtgtaatctagtccctcaaactgtgcagccttacatggagtacacacacacttgcagccttgaagtactacccactgaggggagaaggcacggcaaggggaaaggttggcacaggatggagcaagtgctttttctcacacattctggaggaaaagttatccagttcttctgttctagaaacacccctgtccttcagaaaccagggtctagttgctctggctaccaggcgtgagcaggtggtggtagcaccacaggccccggttaccatcactgtcccatgtctttgatcttcgtccttgtggggactggcctgcatggcctcggtggcagcgagccctgcagaggcaagtgcatcagcatcactgtgtttgttcccaggttacgtcggcgctgctaccgtgggtgctgctgcatggtggttcattgctgctgacggtggtccaagagtgtccttctaccagctggtactcagtcacctttctttctgtaccttacatgagaagtgttgtgaggccttgacctttctgtggtttcggtatctatcaaatcatcttaagactcagacaataaacagttacatctaagatgattctgaaggaccagggcttctccgagaaattggggtaaacctcttggctggctctgcattcaggctggtctgtgctaggcttggtatggggttggagcctggacttgggaaatatactgggctgataggaatttgattggattttcttgcagagtcatttcctacagtgtaaagaggacaacccggactttgaaggcgtggattgtgcaatctttgaatccccatacccgatgacaatggcgctctctgttctagtaactatagaaat

SEQ ID NO: 581 - DNA, 4066 bp, Homo sapiens
tccagtattcttcccctcacctgattttcacccagatacattatgttaaatttactttcttctcttttaaaaaaaaatcttagttttgaaacatactataagtgtactctcctctcccccagaggtaactgaagttggaatttagcaaaaatattaaaaacatgggagtgctgtttttgtgtctgtagacagtattatttttgcatgcttttgaaggcatattttttggccgagtgcagtggctcatgcctgtaaccccaacacttgggaggccgaggcaggtgaatcacttggggtcaggagttcaagaccagcctggccaacatggtgaaaccccgtctgtactaaaaatacaaaaaattgctgggtgtggtggtgggcgcctgtaatcccagctactcgggagattgaggcaggagaatcgcttgaacccaggaggcgtgcagtgagccgagactgcgccactgcactacagcctgggcgacagagcgggactccatctcagaaaaataaaaatttgcatatttttgcaatctgcatctttctacttgaaatttatccatgtggatacaagtgcttcctcttgactgccacataggttgtgtttttgtttttagtaagataatacagataaatttgaagtcccctttgtcccacttcggtaaacttatttggtaattttacatttcctaggtaaaatgtgttttgtgacaccaacttatgaaacaaaaattctaaaactctttgccaagagacctacggctctattcattttcctcctgcttcccattcagtgggcttttgcctaggggtatgaatgtggcatgccagttggctgacccaaccattgctttccctttcagactggcgatggcgtgaacgatgctcctgctctgaagaaagccgagattggcattgctatgggctctggcactgcggtggctaaaaccgcctctgagatggtcctggcggatgacaacttctccaccattgtggctgccgttgaggaggggcgggcaatctacaacaacatgaaacagttcatccgctacctcatctcgtccaacgtcggggaagttgtctggtaggtctctgtgacagcatcacttactgtacgcctttatctaaatgggtcatggagcccagttctcgcagtttgctctccagattgcagcagctttggtctttgtgcctgagttggaagaggggagtgggcaagacagaaatgccttatggaagcagtggtgctttggccctcgggagggttgtctgcagctgccccaatgtgcaaagaatcctctttaacgtgagactgagctaacattaaccaggtagtcacatgaaattcttgccctccaaaagttggctttatctcagtcagcttaataatttttttatttttatttatttttttgagacagtctcgctgtcgcccaggcttcgggcagtggcacgatctcagctcactgtcccctccacctcctgggttcaagcctcccgaacagctgggattacaggcatgcgccaccactccctgccatttttttgtgttttagtagaaatgaggtttcaccatgttgcccaggctggtctcttaactgctgagctcagccagtctgcccaccttggcttcccaaagtgctgggattacaggcataagccaccgcacctggcctcagtcatctgaatttaagtaataaactaagtaaaattgagctttaattcaaaattgggtataagtattttacagattacctgaagttgttgtcatttatttttctggaggagggcgggttgatgatgctctttaaatagtggccagaagtcatttgggctctctttgtcttcttttcttgattggaaacagtattttcctgacagcagcccttggatttcccgaggctttgattcctgttcagctgctctgggtcaatctggtgacagatggcctgcctgccactgcactggggttcaaccctcctgatctggacatcatgaataaacctccccggaacccaaaggaaccattgatcagcgggtggctctttttccgttacttggctattggctgtgagtacaatttttttatattactgatttttaaacaaaatgtttgtgagctgaaattttgtaaattcatcccttaaaagcgtgttttttcttctatccccgtatagggtagcaaaagacagagatgccctcttacagttcgatgaactatacatccaatttaccagagtcctttcacagttagttccagttttagcatcctgcccttacttgggcttttctgaatgagcaattaaacatcagggttttcagattgagccctctgtgcaaagggataagaatgattcacgctaggttctgccttccaagagttcataggtgggatttaaatagataattgtcaccaagttataaaatttagtccctgtttccataagagaagggttgcgcagtggctggtcccttttatatataaatcatctctttagccctcatcttcctcaccccgggttcttccccatttcatagattgggaaagtgaggtgaaatcacttccctgggatcccataggaaggcattgtgttttcataatatattcacatgacttcaaattcaaaaagcacacaatggcatagaatggaaagggtttgggccagtcacttccctctggcgttgaggtgctcatgtaccctgtgcccttccggagagattccagcatgctgtgcacacctgcatgttgacccttgtcttgccttcttcctgcttgtcagatccttccatatccggacatgcgtagtgcctcatccttgcagccagcggccttcatgctccactgtaattcgtgggttagtgggtatatgcacttgttgtttttgatgctaccacatggggatatttgcctcgtctgaactctgtgtattctctgctgcaccttgttgcttctttgcaataaacttcctgaactcaaagctaatactggggggaatcccagaagctgctgagggcagggccatgctgctcagtgttccaccctagctcctgacagcatttccctagaaaactgctgctgggcctctaatggagcaaataaatctgtgtacaactaggcagcaatagtttgtccaaaagtcctggtgtaatctagtccctcaaactgtgcagccttacatggagtacacacacacttgcagccttgaagtactacccactgaggggagaaggcacggcaaggggaaaggttggcacaggatggagcaagtgctttttctcacacattctggaggaaaagttatccagttcttctgttctagaaacacccctgtccttcagaaaccagggtctagttgctctggctaccaggcgtgagcaggtggtggtagcaccacaggccccggttaccatcactgtcccatgtctttgatcttcgtccttgtggggactggcctgcatggcctcggtggcagcgagccctgcagaggcaagtgcatcagcatcactgtgtttgttcccaggttacgtcggcgctgctaccgtgggtgctgctgcatggtggttcattgctgctgacggtggtccaagagtgtccttctaccagctggtactcagtcacctttctttctgtaccttacatgagaagtgttgtgaggccttgacctttctgtggtttcggtatctatcaaatcatcttaagactcagacaataaacagttacatctaagatgattctgaaggaccagggcttctccgagaaattggggtaaacctcttggctggctctgcattcaggctggtctgtgctaggcttggtatggggttggagcctggacttgggaaatatactgggctgataggaatttgattggattttcttgcagagtcatttcctacagtgtaaagaggacaacccggactttgaaggcgtggattgtgcaatctttgaatccccatacccgatgacaatggcgctctctgttctagtaactatagaaatgtgtaacgccctcaacaggttagtgcaccttcacggcaggctgaggcgagcatggtgactgccagg

SEQ ID NO: 582 - DNA, 4047 bp, Homo sapiens
gaggtttcaccatgttgcccaggctggtctcttaactgctgagctcagccagtctgcccaccttggcttcccaaagtgctgggattacaggcataagccaccgcacctggcctcagtcatctgaatttaagtaataaactaagtaaaattgagctttaattcaaaattgggtataagtattttacagattacctgaagttgttgtcatttatttttctggaggagggcgggttgatgatgctctttaaatagtggccagaagtcatttgggctctctttgtcttcttttcttgattggaaacagtattttcctgacagcagcccttggatttcccgaggctttgattcctgttcagctgctctgggtcaatctggtgacagatggcctgcctgccactgcactggggttcaaccctcctgatctggacatcatgaataaacctccccggaacccaaaggaaccattgatcagcgggtggctctttttccgttacttggctattggctgtgagtacaatttttttatattactgatttttaaacaaaatgtttgtgagctgaaattttgtaaattcatcccttaaaagcgtgttttttcttctatccccgtatagggtagcaaaagacagagatgccctcttacagttcgatgaactatacatccaatttaccagagtcctttcacagttagttccagttttagcatcctgcccttacttgggcttttctgaatgagcaattaaacatcagggttttcagattgagccctctgtgcaaagggataagaatgattcacgctaggttctgccttccaagagttcataggtgggatttaaatagataattgtcaccaagttataaaatttagtccctgtttccataagagaagggttgcgcagtggctggtcccttttatatataaatcatctctttagccctcatcttcctcaccccgggttcttccccatttcatagattgggaaagtgaggtgaaatcacttccctgggatcccataggaaggcattgtgttttcataatatattcacatgacttcaaattcaaaaagcacacaatggcatagaatggaaagggtttgggccagtcacttccctctggcgttgaggtgctcatgtaccctgtgcccttccggagagattccagcatgctgtgcacacctgcatgttgacccttgtcttgccttcttcctgcttgtcagatccttccatatccggacatgcgtagtgcctcatccttgcagccagcggccttcatgctccactgtaattcgtgggttagtgggtatatgcacttgttgtttttgatgctaccacatggggatatttgcctcgtctgaactctgtgtattctctgctgcaccttgttgcttctttgcaataaacttcctgaactcaaagctaatactggggggaatcccagaagctgctgagggcagggccatgctgctcagtgttccaccctagctcctgacagcatttccctagaaaactgctgctgggcctctaatggagcaaataaatctgtgtacaactaggcagcaatagtttgtccaaaagtcctggtgtaatctagtccctcaaactgtgcagccttacatggagtacacacacacttgcagccttgaagtactacccactgaggggagaaggcacggcaaggggaaaggttggcacaggatggagcaagtgctttttctcacacattctggaggaaaagttatccagttcttctgttctagaaacacccctgtccttcagaaaccagggtctagttgctctggctaccaggcgtgagcaggtggtggtagcaccacaggccccggttaccatcactgtcccatgtctttgatcttcgtccttgtggggactggcctgcatggcctcggtggcagcgagccctgcagaggcaagtgcatcagcatcactgtgtttgttcccaggttacgtcggcgctgctaccgtgggtgctgctgcatggtggttcattgctgctgacggtggtccaagagtgtccttctaccagctggtactcagtcacctttctttctgtaccttacatgagaagtgttgtgaggccttgacctttctgtggtttcggtatctatcaaatcatcttaagactcagacaataaacagttacatctaagatgattctgaaggaccagggcttctccgagaaattggggtaaacctcttggctggctctgcattcaggctggtctgtgctaggcttggtatggggttggagcctggacttgggaaatatactgggctgataggaatttgattggattttcttgcagagtcatttcctacagtgtaaagaggacaacccggactttgaaggcgtggattgtgcaatctttgaatccccatacccgatgacaatggcgctctctgttctagtaactatagaaatgtgtaacgccctcaacaggttagtgcaccttcacggcaggctgaggcgagcatggtgactgccagggcaccggggaattgtgtgtagtcacggttgattgaggatcacaggacagttcttcccttcccaaaagaaaggagaacaggcaataccagttttaaaagcatgagctgtcgtcacctccaggaagtagtgggagtgcttagccctgtgtttcttaggagctcttccttaaaagaaaccgtgggggccaaaaataggaactttggtacccctgtatgccagcacccacagggaaggaacctcaccctttcacacagacaaatggtaccatccagttaagcccgtgacaaaaatggaaatttctaaatagcccaagtctccagggcaattgggaacagctttgaacccactaagatggggtctgctatgccaaaacatagatacagaattcacagtttgtcctgcattaggacattctcttcaactttgccactgtagaaagtggaggtaggtcagcggatggtgccacattaacagccgccttactgaagtgtagtccaacagggtcttactgccactgtgacacgtgccttgccttgggggtgcgtttccccacctctccttgctctgcagcttgtccgaaaaccagtccttgctgaggatgcccccctgggagaacatctggctcgtgggctccatctgcctgtccatgtcactccacttcctgatcctctatgtcgaacccttgccagtaagtggttgggtggggcttgggaccagccacctccttccaggggaggctggaggcgtgacacgtcttccctgtgtgtcagctcatcttccagatcacaccgctgaacgtgacccagtggctgatggtgctgaaaatctccttgcccgtgattctcatggatgagacgctcaagtttgtggcccgcaactacctggaacctggtaaagagtgtgtgcagcctgccaccaaatcctgctcgttctcggcatgcaccgatgggatttcctggccgtttgtgctgctcataatgcccctggtgatctgggtctatagcacagacactaactttagcgatatgttctggtcttgactgacagttttccataaagaagatgtttaacttaatcaattaatttttttattgtttaaagcaactgtctatttctgctgaattttcacatgaacatactggctggtgatggaggtttcatactctagattttgttttgctttttctgactccagtggggcaagattttccttttttatacacataattaaagtgtccattgacatgtacagagaactaacactattttatgcaaatatttttttgtagatgaaaaagcatgtacagtgttctgtttaatactcatccttgtataaaaaaaatagttgagccagcagacattgtcagcaaattaattggcagcagattttaggaaatgaatgtgtgtggttttttttctaaaactaaatagcatgtattgtgtcttttgcatgatgatccggatttaatttgatatcacagtctaatttttattcataagccaatttttctgcactgagcagagtcttgctacctcagtcagta

SEQ ID NO: 583 - DNA, 4071 bp, Homo sapiens
atttcccgaggctttgattcctgttcagctgctctgggtcaatctggtgacagatggcctgcctgccactgcactggggttcaaccctcctgatctggacatcatgaataaacctccccggaacccaaaggaaccattgatcagcgggtggctctttttccgttacttggctattggctgtgagtacaatttttttatattactgatttttaaacaaaatgtttgtgagctgaaattttgtaaattcatcccttaaaagcgtgttttttcttctatccccgtatagggtagcaaaagacagagatgccctcttacagttcgatgaactatacatccaatttaccagagtcctttcacagttagttccagttttagcatcctgcccttacttgggcttttctgaatgagcaattaaacatcagggttttcagattgagccctctgtgcaaagggataagaatgattcacgctaggttctgccttccaagagttcataggtgggatttaaatagataattgtcaccaagttataaaatttagtccctgtttccataagagaagggttgcgcagtggctggtcccttttatatataaatcatctctttagccctcatcttcctcaccccgggttcttccccatttcatagattgggaaagtgaggtgaaatcacttccctgggatcccataggaaggcattgtgttttcataatatattcacatgacttcaaattcaaaaagcacacaatggcatagaatggaaagggtttgggccagtcacttccctctggcgttgaggtgctcatgtaccctgtgcccttccggagagattccagcatgctgtgcacacctgcatgttgacccttgtcttgccttcttcctgcttgtcagatccttccatatccggacatgcgtagtgcctcatccttgcagccagcggccttcatgctccactgtaattcgtgggttagtgggtatatgcacttgttgtttttgatgctaccacatggggatatttgcctcgtctgaactctgtgtattctctgctgcaccttgttgcttctttgcaataaacttcctgaactcaaagctaatactggggggaatcccagaagctgctgagggcagggccatgctgctcagtgttccaccctagctcctgacagcatttccctagaaaactgctgctgggcctctaatggagcaaataaatctgtgtacaactaggcagcaatagtttgtccaaaagtcctggtgtaatctagtccctcaaactgtgcagccttacatggagtacacacacacttgcagccttgaagtactacccactgaggggagaaggcacggcaaggggaaaggttggcacaggatggagcaagtgctttttctcacacattctggaggaaaagttatccagttcttctgttctagaaacacccctgtccttcagaaaccagggtctagttgctctggctaccaggcgtgagcaggtggtggtagcaccacaggccccggttaccatcactgtcccatgtctttgatcttcgtccttgtggggactggcctgcatggcctcggtggcagcgagccctgcagaggcaagtgcatcagcatcactgtgtttgttcccaggttacgtcggcgctgctaccgtgggtgctgctgcatggtggttcattgctgctgacggtggtccaagagtgtccttctaccagctggtactcagtcacctttctttctgtaccttacatgagaagtgttgtgaggccttgacctttctgtggtttcggtatctatcaaatcatcttaagactcagacaataaacagttacatctaagatgattctgaaggaccagggcttctccgagaaattggggtaaacctcttggctggctctgcattcaggctggtctgtgctaggcttggtatggggttggagcctggacttgggaaatatactgggctgataggaatttgattggattttcttgcagagtcatttcctacagtgtaaagaggacaacccggactttgaaggcgtggattgtgcaatctttgaatccccatacccgatgacaatggcgctctctgttctagtaactatagaaatgtgtaacgccctcaacaggttagtgcaccttcacggcaggctgaggcgagcatggtgactgccagggcaccggggaattgtgtgtagtcacggttgattgaggatcacaggacagttcttcccttcccaaaagaaaggagaacaggcaataccagttttaaaagcatgagctgtcgtcacctccaggaagtagtgggagtgcttagccctgtgtttcttaggagctcttccttaaaagaaaccgtgggggccaaaaataggaactttggtacccctgtatgccagcacccacagggaaggaacctcaccctttcacacagacaaatggtaccatccagttaagcccgtgacaaaaatggaaatttctaaatagcccaagtctccagggcaattgggaacagctttgaacccactaagatggggtctgctatgccaaaacatagatacagaattcacagtttgtcctgcattaggacattctcttcaactttgccactgtagaaagtggaggtaggtcagcggatggtgccacattaacagccgccttactgaagtgtagtccaacagggtcttactgccactgtgacacgtgccttgccttgggggtgcgtttccccacctctccttgctctgcagcttgtccgaaaaccagtccttgctgaggatgcccccctgggagaacatctggctcgtgggctccatctgcctgtccatgtcactccacttcctgatcctctatgtcgaacccttgccagtaagtggttgggtggggcttgggaccagccacctccttccaggggaggctggaggcgtgacacgtcttccctgtgtgtcagctcatcttccagatcacaccgctgaacgtgacccagtggctgatggtgctgaaaatctccttgcccgtgattctcatggatgagacgctcaagtttgtggcccgcaactacctggaacctggtaaagagtgtgtgcagcctgccaccaaatcctgctcgttctcggcatgcaccgatgggatttcctggccgtttgtgctgctcataatgcccctggtgatctgggtctatagcacagacactaactttagcgatatgttctggtcttgactgacagttttccataaagaagatgtttaacttaatcaattaatttttttattgtttaaagcaactgtctatttctgctgaattttcacatgaacatactggctggtgatggaggtttcatactctagattttgttttgctttttctgactccagtggggcaagattttccttttttatacacataattaaagtgtccattgacatgtacagagaactaacactattttatgcaaatatttttttgtagatgaaaaagcatgtacagtgttctgtttaatactcatccttgtataaaaaaaatagttgagccagcagacattgtcagcaaattaattggcagcagattttaggaaatgaatgtgtgtggttttttttctaaaactaaatagcatgtattgtgtcttttgcatgatgatccggatttaatttgatatcacagtctaatttttattcataagccaatttttctgcactgagcagagtcttgctacctcagtcagtattgttttggtttgctacttccctcacccactttggcctccgttcaccccaccccaccccacctctccccaccttacccccgccccgcttggcttcttctttaggattgtgatggttcgttctgtttacatcagttttaacgagaggtatgcctgtactcgcttgtgcagaaaacattgttccagattcaatcgactgggtttatgtcccttcacatagtttttaaggttatttatttaaatgtctaatgtattttattgtaacagacattgttttgccaacattgcctatttcagtggcacgtcatctagttttaaaaaaataaaacattttaaatggacagagaaaaataa

SEQ ID NO: 584 - DNA, 4055 bp, Homo sapiens
cactggggttcaaccctcctgatctggacatcatgaataaacctccccggaacccaaaggaaccattgatcagcgggtggctctttttccgttacttggctattggctgtgagtacaatttttttatattactgatttttaaacaaaatgtttgtgagctgaaattttgtaaattcatcccttaaaagcgtgttttttcttctatccccgtatagggtagcaaaagacagagatgccctcttacagttcgatgaactatacatccaatttaccagagtcctttcacagttagttccagttttagcatcctgcccttacttgggcttttctgaatgagcaattaaacatcagggttttcagattgagccctctgtgcaaagggataagaatgattcacgctaggttctgccttccaagagttcataggtgggatttaaatagataattgtcaccaagttataaaatttagtccctgtttccataagagaagggttgcgcagtggctggtcccttttatatataaatcatctctttagccctcatcttcctcaccccgggttcttccccatttcatagattgggaaagtgaggtgaaatcacttccctgggatcccataggaaggcattgtgttttcataatatattcacatgacttcaaattcaaaaagcacacaatggcatagaatggaaagggtttgggccagtcacttccctctggcgttgaggtgctcatgtaccctgtgcccttccggagagattccagcatgctgtgcacacctgcatgttgacccttgtcttgccttcttcctgcttgtcagatccttccatatccggacatgcgtagtgcctcatccttgcagccagcggccttcatgctccactgtaattcgtgggttagtgggtatatgcacttgttgtttttgatgctaccacatggggatatttgcctcgtctgaactctgtgtattctctgctgcaccttgttgcttctttgcaataaacttcctgaactcaaagctaatactggggggaatcccagaagctgctgagggcagggccatgctgctcagtgttccaccctagctcctgacagcatttccctagaaaactgctgctgggcctctaatggagcaaataaatctgtgtacaactaggcagcaatagtttgtccaaaagtcctggtgtaatctagtccctcaaactgtgcagccttacatggagtacacacacacttgcagccttgaagtactacccactgaggggagaaggcacggcaaggggaaaggttggcacaggatggagcaagtgctttttctcacacattctggaggaaaagttatccagttcttctgttctagaaacacccctgtccttcagaaaccagggtctagttgctctggctaccaggcgtgagcaggtggtggtagcaccacaggccccggttaccatcactgtcccatgtctttgatcttcgtccttgtggggactggcctgcatggcctcggtggcagcgagccctgcagaggcaagtgcatcagcatcactgtgtttgttcccaggttacgtcggcgctgctaccgtgggtgctgctgcatggtggttcattgctgctgacggtggtccaagagtgtccttctaccagctggtactcagtcacctttctttctgtaccttacatgagaagtgttgtgaggccttgacctttctgtggtttcggtatctatcaaatcatcttaagactcagacaataaacagttacatctaagatgattctgaaggaccagggcttctccgagaaattggggtaaacctcttggctggctctgcattcaggctggtctgtgctaggcttggtatggggttggagcctggacttgggaaatatactgggctgataggaatttgattggattttcttgcagagtcatttcctacagtgtaaagaggacaacccggactttgaaggcgtggattgtgcaatctttgaatccccatacccgatgacaatggcgctctctgttctagtaactatagaaatgtgtaacgccctcaacaggttagtgcaccttcacggcaggctgaggcgagcatggtgactgccagggcaccggggaattgtgtgtagtcacggttgattgaggatcacaggacagttcttcccttcccaaaagaaaggagaacaggcaataccagttttaaaagcatgagctgtcgtcacctccaggaagtagtgggagtgcttagccctgtgtttcttaggagctcttccttaaaagaaaccgtgggggccaaaaataggaactttggtacccctgtatgccagcacccacagggaaggaacctcaccctttcacacagacaaatggtaccatccagttaagcccgtgacaaaaatggaaatttctaaatagcccaagtctccagggcaattgggaacagctttgaacccactaagatggggtctgctatgccaaaacatagatacagaattcacagtttgtcctgcattaggacattctcttcaactttgccactgtagaaagtggaggtaggtcagcggatggtgccacattaacagccgccttactgaagtgtagtccaacagggtcttactgccactgtgacacgtgccttgccttgggggtgcgtttccccacctctccttgctctgcagcttgtccgaaaaccagtccttgctgaggatgcccccctgggagaacatctggctcgtgggctccatctgcctgtccatgtcactccacttcctgatcctctatgtcgaacccttgccagtaagtggttgggtggggcttgggaccagccacctccttccaggggaggctggaggcgtgacacgtcttccctgtgtgtcagctcatcttccagatcacaccgctgaacgtgacccagtggctgatggtgctgaaaatctccttgcccgtgattctcatggatgagacgctcaagtttgtggcccgcaactacctggaacctggtaaagagtgtgtgcagcctgccaccaaatcctgctcgttctcggcatgcaccgatgggatttcctggccgtttgtgctgctcataatgcccctggtgatctgggtctatagcacagacactaactttagcgatatgttctggtcttgactgacagttttccataaagaagatgtttaacttaatcaattaatttttttattgtttaaagcaactgtctatttctgctgaattttcacatgaacatactggctggtgatggaggtttcatactctagattttgttttgctttttctgactccagtggggcaagattttccttttttatacacataattaaagtgtccattgacatgtacagagaactaacactattttatgcaaatatttttttgtagatgaaaaagcatgtacagtgttctgtttaatactcatccttgtataaaaaaaatagttgagccagcagacattgtcagcaaattaattggcagcagattttaggaaatgaatgtgtgtggttttttttctaaaactaaatagcatgtattgtgtcttttgcatgatgatccggatttaatttgatatcacagtctaatttttattcataagccaatttttctgcactgagcagagtcttgctacctcagtcagtattgttttggtttgctacttccctcacccactttggcctccgttcaccccaccccaccccacctctccccaccttacccccgccccgcttggcttcttctttaggattgtgatggttcgttctgtttacatcagttttaacgagaggtatgcctgtactcgcttgtgcagaaaacattgttccagattcaatcgactgggtttatgtcccttcacatagtttttaaggttatttatttaaatgtctaatgtattttattgtaacagacattgttttgccaacattgcctatttcagtggcacgtcatctagttttaaaaaaataaaacattttaaatggacagagaaaaataactgtcttgtctttaactcgtaagtggcttacctgggactaacagacatgtccaac

SEQ ID NO: 585 - DNA, 4700 bp, Homo sapiens
accctcctgatctggacatcatgaataaacctccccggaacccaaaggaaccattgatcagcgggtggctctttttccgttacttggctattggctgtgagtacaatttttttatattactgatttttaaacaaaatgtttgtgagctgaaattttgtaaattcatcccttaaaagcgtgttttttcttctatccccgtatagggtagcaaaagacagagatgccctcttacagttcgatgaactatacatccaatttaccagagtcctttcacagttagttccagttttagcatcctgcccttacttgggcttttctgaatgagcaattaaacatcagggttttcagattgagccctctgtgcaaagggataagaatgattcacgctaggttctgccttccaagagttcataggtgggatttaaatagataattgtcaccaagttataaaatttagtccctgtttccataagagaagggttgcgcagtggctggtcccttttatatataaatcatctctttagccctcatcttcctcaccccgggttcttccccatttcatagattgggaaagtgaggtgaaatcacttccctgggatcccataggaaggcattgtgttttcataatatattcacatgacttcaaattcaaaaagcacacaatggcatagaatggaaagggtttgggccagtcacttccctctggcgttgaggtgctcatgtaccctgtgcccttccggagagattccagcatgctgtgcacacctgcatgttgacccttgtcttgccttcttcctgcttgtcagatccttccatatccggacatgcgtagtgcctcatccttgcagccagcggccttcatgctccactgtaattcgtgggttagtgggtatatgcacttgttgtttttgatgctaccacatggggatatttgcctcgtctgaactctgtgtattctctgctgcaccttgttgcttctttgcaataaacttcctgaactcaaagctaatactggggggaatcccagaagctgctgagggcagggccatgctgctcagtgttccaccctagctcctgacagcatttccctagaaaactgctgctgggcctctaatggagcaaataaatctgtgtacaactaggcagcaatagtttgtccaaaagtcctggtgtaatctagtccctcaaactgtgcagccttacatggagtacacacacacttgcagccttgaagtactacccactgaggggagaaggcacggcaaggggaaaggttggcacaggatggagcaagtgctttttctcacacattctggaggaaaagttatccagttcttctgttctagaaacacccctgtccttcagaaaccagggtctagttgctctggctaccaggcgtgagcaggtggtggtagcaccacaggccccggttaccatcactgtcccatgtctttgatcttcgtccttgtggggactggcctgcatggcctcggtggcagcgagccctgcagaggcaagtgcatcagcatcactgtgtttgttcccaggttacgtcggcgctgctaccgtgggtgctgctgcatggtggttcattgctgctgacggtggtccaagagtgtccttctaccagctggtactcagtcacctttctttctgtaccttacatgagaagtgttgtgaggccttgacctttctgtggtttcggtatctatcaaatcatcttaagactcagacaataaacagttacatctaagatgattctgaaggaccagggcttctccgagaaattggggtaaacctcttggctggctctgcattcaggctggtctgtgctaggcttggtatggggttggagcctggacttgggaaatatactgggctgataggaatttgattggattttcttgcagagtcatttcctacagtgtaaagaggacaacccggactttgaaggcgtggattgtgcaatctttgaatccccatacccgatgacaatggcgctctctgttctagtaactatagaaatgtgtaacgccctcaacaggttagtgcaccttcacggcaggctgaggcgagcatggtgactgccagggcaccggggaattgtgtgtagtcacggttgattgaggatcacaggacagttcttcccttcccaaaagaaaggagaacaggcaataccagttttaaaagcatgagctgtcgtcacctccaggaagtagtgggagtgcttagccctgtgtttcttaggagctcttccttaaaagaaaccgtgggggccaaaaataggaactttggtacccctgtatgccagcacccacagggaaggaacctcaccctttcacacagacaaatggtaccatccagttaagcccgtgacaaaaatggaaatttctaaatagcccaagtctccagggcaattgggaacagctttgaacccactaagatggggtctgctatgccaaaacatagatacagaattcacagtttgtcctgcattaggacattctcttcaactttgccactgtagaaagtggaggtaggtcagcggatggtgccacattaacagccgccttactgaagtgtagtccaacagggtcttactgccactgtgacacgtgccttgccttgggggtgcgtttccccacctctccttgctctgcagcttgtccgaaaaccagtccttgctgaggatgcccccctgggagaacatctggctcgtgggctccatctgcctgtccatgtcactccacttcctgatcctctatgtcgaacccttgccagtaagtggttgggtggggcttgggaccagccacctccttccaggggaggctggaggcgtgacacgtcttccctgtgtgtcagctcatcttccagatcacaccgctgaacgtgacccagtggctgatggtgctgaaaatctccttgcccgtgattctcatggatgagacgctcaagtttgtggcccgcaactacctggaacctggtaaagagtgtgtgcagcctgccaccaaatcctgctcgttctcggcatgcaccgatgggatttcctggccgtttgtgctgctcataatgcccctggtgatctgggtctatagcacagacactaactttagcgatatgttctggtcttgactgacagttttccataaagaagatgtttaacttaatcaattaatttttttattgtttaaagcaactgtctatttctgctgaattttcacatgaacatactggctggtgatggaggtttcatactctagattttgttttgctttttctgactccagtggggcaagattttccttttttatacacataattaaagtgtccattgacatgtacagagaactaacactattttatgcaaatatttttttgtagatgaaaaagcatgtacagtgttctgtttaatactcatccttgtataaaaaaaatagttgagccagcagacattgtcagcaaattaattggcagcagattttaggaaatgaatgtgtgtggttttttttctaaaactaaatagcatgtattgtgtcttttgcatgatgatccggatttaatttgatatcacagtctaatttttattcataagccaatttttctgcactgagcagagtcttgctacctcagtcagtattgttttggtttgctacttccctcacccactttggcctccgttcaccccaccccaccccacctctccccaccttacccccgccccgcttggcttcttctttaggattgtgatggttcgttctgtttacatcagttttaacgagaggtatgcctgtactcgcttgtgcagaaaacattgttccagattcaatcgactgggtttatgtcccttcacatagtttttaaggttatttatttaaatgtctaatgtattttattgtaacagacattgttttgccaacattgcctatttcagtggcacgtcatctagttttaaaaaaataaaacattttaaatggacagagaaaaataactgtcttgtctttaactcgtaagtggcttacctgggactaacagacatgtccaactttctctccagttcttagctcagaactttagttgtactctgcttgaggggaagaaggctcctgctctgctgtgtaggtagtcataggaattgtattcttaatgtacaggcactaattgtcatctgtgatgtacattttatgcaagtttctgctggcctggtatagagaacataagggcaagtgtgtatgtgtgtgtatgtgtgtgttttgtaaaatctgtaaatagcacatgaccaaatgaacatattgtatagaactatttttatttgaatgtggcactaaccaccaccaccgttactacgatcaatgtttgcgcatgttcgagatgagtctcaccaacagtgtgtaagtcattaacagtcctaactgtggtgttttcctccaatgccttccaacatccatcaactaacgtgagtattttcttcctgggatttggatgctttagcctaaaggtgactgccaccaagtgagataactgtatgtcactaacttataagccgcctccatggcagatgctgctgtgctccctgatgccctgtgagcaccggggttgcctgtggcgcctgccatgtgactcgggcgcagcatcagctggctggaggtgtggctttcatagacctccacaggctgcctaggacaagatgaccaggagggccc

SEQ ID NO: 586 - DNA, 4042 bp, Homo sapiens
caatggcatagaatggaaagggtttgggccagtcacttccctctggcgttgaggtgctcatgtaccctgtgcccttccggagagattccagcatgctgtgcacacctgcatgttgacccttgtcttgccttcttcctgcttgtcagatccttccatatccggacatgcgtagtgcctcatccttgcagccagcggccttcatgctccactgtaattcgtgggttagtgggtatatgcacttgttgtttttgatgctaccacatggggatatttgcctcgtctgaactctgtgtattctctgctgcaccttgttgcttctttgcaataaacttcctgaactcaaagctaatactggggggaatcccagaagctgctgagggcagggccatgctgctcagtgttccaccctagctcctgacagcatttccctagaaaactgctgctgggcctctaatggagcaaataaatctgtgtacaactaggcagcaatagtttgtccaaaagtcctggtgtaatctagtccctcaaactgtgcagccttacatggagtacacacacacttgcagccttgaagtactacccactgaggggagaaggcacggcaaggggaaaggttggcacaggatggagcaagtgctttttctcacacattctggaggaaaagttatccagttcttctgttctagaaacacccctgtccttcagaaaccagggtctagttgctctggctaccaggcgtgagcaggtggtggtagcaccacaggccccggttaccatcactgtcccatgtctttgatcttcgtccttgtggggactggcctgcatggcctcggtggcagcgagccctgcagaggcaagtgcatcagcatcactgtgtttgttcccaggttacgtcggcgctgctaccgtgggtgctgctgcatggtggttcattgctgctgacggtggtccaagagtgtccttctaccagctggtactcagtcacctttctttctgtaccttacatgagaagtgttgtgaggccttgacctttctgtggtttcggtatctatcaaatcatcttaagactcagacaataaacagttacatctaagatgattctgaaggaccagggcttctccgagaaattggggtaaacctcttggctggctctgcattcaggctggtctgtgctaggcttggtatggggttggagcctggacttgggaaatatactgggctgataggaatttgattggattttcttgcagagtcatttcctacagtgtaaagaggacaacccggactttgaaggcgtggattgtgcaatctttgaatccccatacccgatgacaatggcgctctctgttctagtaactatagaaatgtgtaacgccctcaacaggttagtgcaccttcacggcaggctgaggcgagcatggtgactgccagggcaccggggaattgtgtgtagtcacggttgattgaggatcacaggacagttcttcccttcccaaaagaaaggagaacaggcaataccagttttaaaagcatgagctgtcgtcacctccaggaagtagtgggagtgcttagccctgtgtttcttaggagctcttccttaaaagaaaccgtgggggccaaaaataggaactttggtacccctgtatgccagcacccacagggaaggaacctcaccctttcacacagacaaatggtaccatccagttaagcccgtgacaaaaatggaaatttctaaatagcccaagtctccagggcaattgggaacagctttgaacccactaagatggggtctgctatgccaaaacatagatacagaattcacagtttgtcctgcattaggacattctcttcaactttgccactgtagaaagtggaggtaggtcagcggatggtgccacattaacagccgccttactgaagtgtagtccaacagggtcttactgccactgtgacacgtgccttgccttgggggtgcgtttccccacctctccttgctctgcagcttgtccgaaaaccagtccttgctgaggatgcccccctgggagaacatctggctcgtgggctccatctgcctgtccatgtcactccacttcctgatcctctatgtcgaacccttgccagtaagtggttgggtggggcttgggaccagccacctccttccaggggaggctggaggcgtgacacgtcttccctgtgtgtcagctcatcttccagatcacaccgctgaacgtgacccagtggctgatggtgctgaaaatctccttgcccgtgattctcatggatgagacgctcaagtttgtggcccgcaactacctggaacctggtaaagagtgtgtgcagcctgccaccaaatcctgctcgttctcggcatgcaccgatgggatttcctggccgtttgtgctgctcataatgcccctggtgatctgggtctatagcacagacactaactttagcgatatgttctggtcttgactgacagttttccataaagaagatgtttaacttaatcaattaatttttttattgtttaaagcaactgtctatttctgctgaattttcacatgaacatactggctggtgatggaggtttcatactctagattttgttttgctttttctgactccagtggggcaagattttccttttttatacacataattaaagtgtccattgacatgtacagagaactaacactattttatgcaaatatttttttgtagatgaaaaagcatgtacagtgttctgtttaatactcatccttgtataaaaaaaatagttgagccagcagacattgtcagcaaattaattggcagcagattttaggaaatgaatgtgtgtggttttttttctaaaactaaatagcatgtattgtgtcttttgcatgatgatccggatttaatttgatatcacagtctaatttttattcataagccaatttttctgcactgagcagagtcttgctacctcagtcagtattgttttggtttgctacttccctcacccactttggcctccgttcaccccaccccaccccacctctccccaccttacccccgccccgcttggcttcttctttaggattgtgatggttcgttctgtttacatcagttttaacgagaggtatgcctgtactcgcttgtgcagaaaacattgttccagattcaatcgactgggtttatgtcccttcacatagtttttaaggttatttatttaaatgtctaatgtattttattgtaacagacattgttttgccaacattgcctatttcagtggcacgtcatctagttttaaaaaaataaaacattttaaatggacagagaaaaataactgtcttgtctttaactcgtaagtggcttacctgggactaacagacatgtccaactttctctccagttcttagctcagaactttagttgtactctgcttgaggggaagaaggctcctgctctgctgtgtaggtagtcataggaattgtattcttaatgtacaggcactaattgtcatctgtgatgtacattttatgcaagtttctgctggcctggtatagagaacataagggcaagtgtgtatgtgtgtgtatgtgtgtgttttgtaaaatctgtaaatagcacatgaccaaatgaacatattgtatagaactatttttatttgaatgtggcactaaccaccaccaccgttactacgatcaatgtttgcgcatgttcgagatgagtctcaccaacagtgtgtaagtcattaacagtcctaactgtggtgttttcctccaatgccttccaacatccatcaactaacgtgagtattttcttcctgggatttggatgctttagcctaaaggtgactgccaccaagtgagataactgtatgtcactaacttataagccgcctccatggcagatgctgctgtgctccctgatgccctgtgagcaccggggttgcctgtggcgcctgccatgtgactcgggcgcagcatcagctggctggaggtgtggctttcatagacctccacaggctgcctaggacaagatgaccaggagggcccaa

SEQ ID NO: 587 - DNA, 4029 bp, Homo sapiens
cacatggggatatttgcctcgtctgaactctgtgtattctctgctgcaccttgttgcttctttgcaataaacttcctgaactcaaagctaatactggggggaatcccagaagctgctgagggcagggccatgctgctcagtgttccaccctagctcctgacagcatttccctagaaaactgctgctgggcctctaatggagcaaataaatctgtgtacaactaggcagcaatagtttgtccaaaagtcctggtgtaatctagtccctcaaactgtgcagccttacatggagtacacacacacttgcagccttgaagtactacccactgaggggagaaggcacggcaaggggaaaggttggcacaggatggagcaagtgctttttctcacacattctggaggaaaagttatccagttcttctgttctagaaacacccctgtccttcagaaaccagggtctagttgctctggctaccaggcgtgagcaggtggtggtagcaccacaggccccggttaccatcactgtcccatgtctttgatcttcgtccttgtggggactggcctgcatggcctcggtggcagcgagccctgcagaggcaagtgcatcagcatcactgtgtttgttcccaggttacgtcggcgctgctaccgtgggtgctgctgcatggtggttcattgctgctgacggtggtccaagagtgtccttctaccagctggtactcagtcacctttctttctgtaccttacatgagaagtgttgtgaggccttgacctttctgtggtttcggtatctatcaaatcatcttaagactcagacaataaacagttacatctaagatgattctgaaggaccagggcttctccgagaaattggggtaaacctcttggctggctctgcattcaggctggtctgtgctaggcttggtatggggttggagcctggacttgggaaatatactgggctgataggaatttgattggattttcttgcagagtcatttcctacagtgtaaagaggacaacccggactttgaaggcgtggattgtgcaatctttgaatccccatacccgatgacaatggcgctctctgttctagtaactatagaaatgtgtaacgccctcaacaggttagtgcaccttcacggcaggctgaggcgagcatggtgactgccagggcaccggggaattgtgtgtagtcacggttgattgaggatcacaggacagttcttcccttcccaaaagaaaggagaacaggcaataccagttttaaaagcatgagctgtcgtcacctccaggaagtagtgggagtgcttagccctgtgtttcttaggagctcttccttaaaagaaaccgtgggggccaaaaataggaactttggtacccctgtatgccagcacccacagggaaggaacctcaccctttcacacagacaaatggtaccatccagttaagcccgtgacaaaaatggaaatttctaaatagcccaagtctccagggcaattgggaacagctttgaacccactaagatggggtctgctatgccaaaacatagatacagaattcacagtttgtcctgcattaggacattctcttcaactttgccactgtagaaagtggaggtaggtcagcggatggtgccacattaacagccgccttactgaagtgtagtccaacagggtcttactgccactgtgacacgtgccttgccttgggggtgcgtttccccacctctccttgctctgcagcttgtccgaaaaccagtccttgctgaggatgcccccctgggagaacatctggctcgtgggctccatctgcctgtccatgtcactccacttcctgatcctctatgtcgaacccttgccagtaagtggttgggtggggcttgggaccagccacctccttccaggggaggctggaggcgtgacacgtcttccctgtgtgtcagctcatcttccagatcacaccgctgaacgtgacccagtggctgatggtgctgaaaatctccttgcccgtgattctcatggatgagacgctcaagtttgtggcccgcaactacctggaacctggtaaagagtgtgtgcagcctgccaccaaatcctgctcgttctcggcatgcaccgatgggatttcctggccgtttgtgctgctcataatgcccctggtgatctgggtctatagcacagacactaactttagcgatatgttctggtcttgactgacagttttccataaagaagatgtttaacttaatcaattaatttttttattgtttaaagcaactgtctatttctgctgaattttcacatgaacatactggctggtgatggaggtttcatactctagattttgttttgctttttctgactccagtggggcaagattttccttttttatacacataattaaagtgtccattgacatgtacagagaactaacactattttatgcaaatatttttttgtagatgaaaaagcatgtacagtgttctgtttaatactcatccttgtataaaaaaaatagttgagccagcagacattgtcagcaaattaattggcagcagattttaggaaatgaatgtgtgtggttttttttctaaaactaaatagcatgtattgtgtcttttgcatgatgatccggatttaatttgatatcacagtctaatttttattcataagccaatttttctgcactgagcagagtcttgctacctcagtcagtattgttttggtttgctacttccctcacccactttggcctccgttcaccccaccccaccccacctctccccaccttacccccgccccgcttggcttcttctttaggattgtgatggttcgttctgtttacatcagttttaacgagaggtatgcctgtactcgcttgtgcagaaaacattgttccagattcaatcgactgggtttatgtcccttcacatagtttttaaggttatttatttaaatgtctaatgtattttattgtaacagacattgttttgccaacattgcctatttcagtggcacgtcatctagttttaaaaaaataaaacattttaaatggacagagaaaaataactgtcttgtctttaactcgtaagtggcttacctgggactaacagacatgtccaactttctctccagttcttagctcagaactttagttgtactctgcttgaggggaagaaggctcctgctctgctgtgtaggtagtcataggaattgtattcttaatgtacaggcactaattgtcatctgtgatgtacattttatgcaagtttctgctggcctggtatagagaacataagggcaagtgtgtatgtgtgtgtatgtgtgtgttttgtaaaatctgtaaatagcacatgaccaaatgaacatattgtatagaactatttttatttgaatgtggcactaaccaccaccaccgttactacgatcaatgtttgcgcatgttcgagatgagtctcaccaacagtgtgtaagtcattaacagtcctaactgtggtgttttcctccaatgccttccaacatccatcaactaacgtgagtattttcttcctgggatttggatgctttagcctaaaggtgactgccaccaagtgagataactgtatgtcactaacttataagccgcctccatggcagatgctgctgtgctccctgatgccctgtgagcaccggggttgcctgtggcgcctgccatgtgactcgggcgcagcatcagctggctggaggtgtggctttcatagacctccacaggctgcctaggacaagatgaccaggagggcccaagccagacaaaagccggagtggggagagaggcatttcagccagaccaacaggctgaaggagctgtgcagactattgctaaaatgagggttcgcagctgccaggagtcatcccagaacattgctacttatttattaaaaagctaaaaactagtgaaagcaagtaactgaaccagtgaactctgggtatcgataggttcgtcttaaataggccacttccccactcccccacccccccttgcttggtct

SEQ ID NO: 588 - DNA, 4052 bp, Homo sapiens
ttctggaggaaaagttatccagttcttctgttctagaaacacccctgtccttcagaaaccagggtctagttgctctggctaccaggcgtgagcaggtggtggtagcaccacaggccccggttaccatcactgtcccatgtctttgatcttcgtccttgtggggactggcctgcatggcctcggtggcagcgagccctgcagaggcaagtgcatcagcatcactgtgtttgttcccaggttacgtcggcgctgctaccgtgggtgctgctgcatggtggttcattgctgctgacggtggtccaagagtgtccttctaccagctggtactcagtcacctttctttctgtaccttacatgagaagtgttgtgaggccttgacctttctgtggtttcggtatctatcaaatcatcttaagactcagacaataaacagttacatctaagatgattctgaaggaccagggcttctccgagaaattggggtaaacctcttggctggctctgcattcaggctggtctgtgctaggcttggtatggggttggagcctggacttgggaaatatactgggctgataggaatttgattggattttcttgcagagtcatttcctacagtgtaaagaggacaacccggactttgaaggcgtggattgtgcaatctttgaatccccatacccgatgacaatggcgctctctgttctagtaactatagaaatgtgtaacgccctcaacaggttagtgcaccttcacggcaggctgaggcgagcatggtgactgccagggcaccggggaattgtgtgtagtcacggttgattgaggatcacaggacagttcttcccttcccaaaagaaaggagaacaggcaataccagttttaaaagcatgagctgtcgtcacctccaggaagtagtgggagtgcttagccctgtgtttcttaggagctcttccttaaaagaaaccgtgggggccaaaaataggaactttggtacccctgtatgccagcacccacagggaaggaacctcaccctttcacacagacaaatggtaccatccagttaagcccgtgacaaaaatggaaatttctaaatagcccaagtctccagggcaattgggaacagctttgaacccactaagatggggtctgctatgccaaaacatagatacagaattcacagtttgtcctgcattaggacattctcttcaactttgccactgtagaaagtggaggtaggtcagcggatggtgccacattaacagccgccttactgaagtgtagtccaacagggtcttactgccactgtgacacgtgccttgccttgggggtgcgtttccccacctctccttgctctgcagcttgtccgaaaaccagtccttgctgaggatgcccccctgggagaacatctggctcgtgggctccatctgcctgtccatgtcactccacttcctgatcctctatgtcgaacccttgccagtaagtggttgggtggggcttgggaccagccacctccttccaggggaggctggaggcgtgacacgtcttccctgtgtgtcagctcatcttccagatcacaccgctgaacgtgacccagtggctgatggtgctgaaaatctccttgcccgtgattctcatggatgagacgctcaagtttgtggcccgcaactacctggaacctggtaaagagtgtgtgcagcctgccaccaaatcctgctcgttctcggcatgcaccgatgggatttcctggccgtttgtgctgctcataatgcccctggtgatctgggtctatagcacagacactaactttagcgatatgttctggtcttgactgacagttttccataaagaagatgtttaacttaatcaattaatttttttattgtttaaagcaactgtctatttctgctgaattttcacatgaacatactggctggtgatggaggtttcatactctagattttgttttgctttttctgactccagtggggcaagattttccttttttatacacataattaaagtgtccattgacatgtacagagaactaacactattttatgcaaatatttttttgtagatgaaaaagcatgtacagtgttctgtttaatactcatccttgtataaaaaaaatagttgagccagcagacattgtcagcaaattaattggcagcagattttaggaaatgaatgtgtgtggttttttttctaaaactaaatagcatgtattgtgtcttttgcatgatgatccggatttaatttgatatcacagtctaatttttattcataagccaatttttctgcactgagcagagtcttgctacctcagtcagtattgttttggtttgctacttccctcacccactttggcctccgttcaccccaccccaccccacctctccccaccttacccccgccccgcttggcttcttctttaggattgtgatggttcgttctgtttacatcagttttaacgagaggtatgcctgtactcgcttgtgcagaaaacattgttccagattcaatcgactgggtttatgtcccttcacatagtttttaaggttatttatttaaatgtctaatgtattttattgtaacagacattgttttgccaacattgcctatttcagtggcacgtcatctagttttaaaaaaataaaacattttaaatggacagagaaaaataactgtcttgtctttaactcgtaagtggcttacctgggactaacagacatgtccaactttctctccagttcttagctcagaactttagttgtactctgcttgaggggaagaaggctcctgctctgctgtgtaggtagtcataggaattgtattcttaatgtacaggcactaattgtcatctgtgatgtacattttatgcaagtttctgctggcctggtatagagaacataagggcaagtgtgtatgtgtgtgtatgtgtgtgttttgtaaaatctgtaaatagcacatgaccaaatgaacatattgtatagaactatttttatttgaatgtggcactaaccaccaccaccgttactacgatcaatgtttgcgcatgttcgagatgagtctcaccaacagtgtgtaagtcattaacagtcctaactgtggtgttttcctccaatgccttccaacatccatcaactaacgtgagtattttcttcctgggatttggatgctttagcctaaaggtgactgccaccaagtgagataactgtatgtcactaacttataagccgcctccatggcagatgctgctgtgctccctgatgccctgtgagcaccggggttgcctgtggcgcctgccatgtgactcgggcgcagcatcagctggctggaggtgtggctttcatagacctccacaggctgcctaggacaagatgaccaggagggcccaagccagacaaaagccggagtggggagagaggcatttcagccagaccaacaggctgaaggagctgtgcagactattgctaaaatgagggttcgcagctgccaggagtcatcccagaacattgctacttatttattaaaaagctaaaaactagtgaaagcaagtaactgaaccagtgaactctgggtatcgataggttcgtcttaaataggccacttccccactcccccacccccccttgcttggtcttgtccttggtggctaagacttagctctgcaggggatgttaaagcacagttagtaggacgtggctctgcacagcccaaaaaccagcttactccttagccagggtgtgaggcctcgactatattcttcaaaatgtacttaggctctggttactgggatggccagtagatgtaatgcagatggttggagtttggggagggttaggaggcatcaagcaggacaaggtgctgctgagttcagagggcccacgttcaagggatggaggtggaacctggagaccgactcttaaaagcacagtccgtggttgggtgtggtggctcatgcctgtaagtaagtctcagccctttggaggccacagcagaaggattgcttgagcccaggtactcaaaccagcctgggcaacagagtgaggccctgt

SEQ ID NO: 589 - DNA, 4046 bp, Homo sapiens
catcactgtcccatgtctttgatcttcgtccttgtggggactggcctgcatggcctcggtggcagcgagccctgcagaggcaagtgcatcagcatcactgtgtttgttcccaggttacgtcggcgctgctaccgtgggtgctgctgcatggtggttcattgctgctgacggtggtccaagagtgtccttctaccagctggtactcagtcacctttctttctgtaccttacatgagaagtgttgtgaggccttgacctttctgtggtttcggtatctatcaaatcatcttaagactcagacaataaacagttacatctaagatgattctgaaggaccagggcttctccgagaaattggggtaaacctcttggctggctctgcattcaggctggtctgtgctaggcttggtatggggttggagcctggacttgggaaatatactgggctgataggaatttgattggattttcttgcagagtcatttcctacagtgtaaagaggacaacccggactttgaaggcgtggattgtgcaatctttgaatccccatacccgatgacaatggcgctctctgttctagtaactatagaaatgtgtaacgccctcaacaggttagtgcaccttcacggcaggctgaggcgagcatggtgactgccagggcaccggggaattgtgtgtagtcacggttgattgaggatcacaggacagttcttcccttcccaaaagaaaggagaacaggcaataccagttttaaaagcatgagctgtcgtcacctccaggaagtagtgggagtgcttagccctgtgtttcttaggagctcttccttaaaagaaaccgtgggggccaaaaataggaactttggtacccctgtatgccagcacccacagggaaggaacctcaccctttcacacagacaaatggtaccatccagttaagcccgtgacaaaaatggaaatttctaaatagcccaagtctccagggcaattgggaacagctttgaacccactaagatggggtctgctatgccaaaacatagatacagaattcacagtttgtcctgcattaggacattctcttcaactttgccactgtagaaagtggaggtaggtcagcggatggtgccacattaacagccgccttactgaagtgtagtccaacagggtcttactgccactgtgacacgtgccttgccttgggggtgcgtttccccacctctccttgctctgcagcttgtccgaaaaccagtccttgctgaggatgcccccctgggagaacatctggctcgtgggctccatctgcctgtccatgtcactccacttcctgatcctctatgtcgaacccttgccagtaagtggttgggtggggcttgggaccagccacctccttccaggggaggctggaggcgtgacacgtcttccctgtgtgtcagctcatcttccagatcacaccgctgaacgtgacccagtggctgatggtgctgaaaatctccttgcccgtgattctcatggatgagacgctcaagtttgtggcccgcaactacctggaacctggtaaagagtgtgtgcagcctgccaccaaatcctgctcgttctcggcatgcaccgatgggatttcctggccgtttgtgctgctcataatgcccctggtgatctgggtctatagcacagacactaactttagcgatatgttctggtcttgactgacagttttccataaagaagatgtttaacttaatcaattaatttttttattgtttaaagcaactgtctatttctgctgaattttcacatgaacatactggctggtgatggaggtttcatactctagattttgttttgctttttctgactccagtggggcaagattttccttttttatacacataattaaagtgtccattgacatgtacagagaactaacactattttatgcaaatatttttttgtagatgaaaaagcatgtacagtgttctgtttaatactcatccttgtataaaaaaaatagttgagccagcagacattgtcagcaaattaattggcagcagattttaggaaatgaatgtgtgtggttttttttctaaaactaaatagcatgtattgtgtcttttgcatgatgatccggatttaatttgatatcacagtctaatttttattcataagccaatttttctgcactgagcagagtcttgctacctcagtcagtattgttttggtttgctacttccctcacccactttggcctccgttcaccccaccccaccccacctctccccaccttacccccgccccgcttggcttcttctttaggattgtgatggttcgttctgtttacatcagttttaacgagaggtatgcctgtactcgcttgtgcagaaaacattgttccagattcaatcgactgggtttatgtcccttcacatagtttttaaggttatttatttaaatgtctaatgtattttattgtaacagacattgttttgccaacattgcctatttcagtggcacgtcatctagttttaaaaaaataaaacattttaaatggacagagaaaaataactgtcttgtctttaactcgtaagtggcttacctgggactaacagacatgtccaactttctctccagttcttagctcagaactttagttgtactctgcttgaggggaagaaggctcctgctctgctgtgtaggtagtcataggaattgtattcttaatgtacaggcactaattgtcatctgtgatgtacattttatgcaagtttctgctggcctggtatagagaacataagggcaagtgtgtatgtgtgtgtatgtgtgtgttttgtaaaatctgtaaatagcacatgaccaaatgaacatattgtatagaactatttttatttgaatgtggcactaaccaccaccaccgttactacgatcaatgtttgcgcatgttcgagatgagtctcaccaacagtgtgtaagtcattaacagtcctaactgtggtgttttcctccaatgccttccaacatccatcaactaacgtgagtattttcttcctgggatttggatgctttagcctaaaggtgactgccaccaagtgagataactgtatgtcactaacttataagccgcctccatggcagatgctgctgtgctccctgatgccctgtgagcaccggggttgcctgtggcgcctgccatgtgactcgggcgcagcatcagctggctggaggtgtggctttcatagacctccacaggctgcctaggacaagatgaccaggagggcccaagccagacaaaagccggagtggggagagaggcatttcagccagaccaacaggctgaaggagctgtgcagactattgctaaaatgagggttcgcagctgccaggagtcatcccagaacattgctacttatttattaaaaagctaaaaactagtgaaagcaagtaactgaaccagtgaactctgggtatcgataggttcgtcttaaataggccacttccccactcccccacccccccttgcttggtcttgtccttggtggctaagacttagctctgcaggggatgttaaagcacagttagtaggacgtggctctgcacagcccaaaaaccagcttactccttagccagggtgtgaggcctcgactatattcttcaaaatgtacttaggctctggttactgggatggccagtagatgtaatgcagatggttggagtttggggagggttaggaggcatcaagcaggacaaggtgctgctgagttcagagggcccacgttcaagggatggaggtggaacctggagaccgactcttaaaagcacagtccgtggttgggtgtggtggctcatgcctgtaagtaagtctcagccctttggaggccacagcagaaggattgcttgagcccaggtactcaaaccagcctgggcaacagagtgaggccctgtcaaaaaaaaatcagccttactgtgaagcctccaaggctgctcgcaggcagctgtggctctcgggaagggaggctgctttgcccagcagggaacatttggggcagggggtaaattttgc

SEQ ID NO: 590 - DNA, 4049 bp, Homo sapiens
acctttctttctgtaccttacatgagaagtgttgtgaggccttgacctttctgtggtttcggtatctatcaaatcatcttaagactcagacaataaacagttacatctaagatgattctgaaggaccagggcttctccgagaaattggggtaaacctcttggctggctctgcattcaggctggtctgtgctaggcttggtatggggttggagcctggacttgggaaatatactgggctgataggaatttgattggattttcttgcagagtcatttcctacagtgtaaagaggacaacccggactttgaaggcgtggattgtgcaatctttgaatccccatacccgatgacaatggcgctctctgttctagtaactatagaaatgtgtaacgccctcaacaggttagtgcaccttcacggcaggctgaggcgagcatggtgactgccagggcaccggggaattgtgtgtagtcacggttgattgaggatcacaggacagttcttcccttcccaaaagaaaggagaacaggcaataccagttttaaaagcatgagctgtcgtcacctccaggaagtagtgggagtgcttagccctgtgtttcttaggagctcttccttaaaagaaaccgtgggggccaaaaataggaactttggtacccctgtatgccagcacccacagggaaggaacctcaccctttcacacagacaaatggtaccatccagttaagcccgtgacaaaaatggaaatttctaaatagcccaagtctccagggcaattgggaacagctttgaacccactaagatggggtctgctatgccaaaacatagatacagaattcacagtttgtcctgcattaggacattctcttcaactttgccactgtagaaagtggaggtaggtcagcggatggtgccacattaacagccgccttactgaagtgtagtccaacagggtcttactgccactgtgacacgtgccttgccttgggggtgcgtttccccacctctccttgctctgcagcttgtccgaaaaccagtccttgctgaggatgcccccctgggagaacatctggctcgtgggctccatctgcctgtccatgtcactccacttcctgatcctctatgtcgaacccttgccagtaagtggttgggtggggcttgggaccagccacctccttccaggggaggctggaggcgtgacacgtcttccctgtgtgtcagctcatcttccagatcacaccgctgaacgtgacccagtggctgatggtgctgaaaatctccttgcccgtgattctcatggatgagacgctcaagtttgtggcccgcaactacctggaacctggtaaagagtgtgtgcagcctgccaccaaatcctgctcgttctcggcatgcaccgatgggatttcctggccgtttgtgctgctcataatgcccctggtgatctgggtctatagcacagacactaactttagcgatatgttctggtcttgactgacagttttccataaagaagatgtttaacttaatcaattaatttttttattgtttaaagcaactgtctatttctgctgaattttcacatgaacatactggctggtgatggaggtttcatactctagattttgttttgctttttctgactccagtggggcaagattttccttttttatacacataattaaagtgtccattgacatgtacagagaactaacactattttatgcaaatatttttttgtagatgaaaaagcatgtacagtgttctgtttaatactcatccttgtataaaaaaaatagttgagccagcagacattgtcagcaaattaattggcagcagattttaggaaatgaatgtgtgtggttttttttctaaaactaaatagcatgtattgtgtcttttgcatgatgatccggatttaatttgatatcacagtctaatttttattcataagccaatttttctgcactgagcagagtcttgctacctcagtcagtattgttttggtttgctacttccctcacccactttggcctccgttcaccccaccccaccccacctctccccaccttacccccgccccgcttggcttcttctttaggattgtgatggttcgttctgtttacatcagttttaacgagaggtatgcctgtactcgcttgtgcagaaaacattgttccagattcaatcgactgggtttatgtcccttcacatagtttttaaggttatttatttaaatgtctaatgtattttattgtaacagacattgttttgccaacattgcctatttcagtggcacgtcatctagttttaaaaaaataaaacattttaaatggacagagaaaaataactgtcttgtctttaactcgtaagtggcttacctgggactaacagacatgtccaactttctctccagttcttagctcagaactttagttgtactctgcttgaggggaagaaggctcctgctctgctgtgtaggtagtcataggaattgtattcttaatgtacaggcactaattgtcatctgtgatgtacattttatgcaagtttctgctggcctggtatagagaacataagggcaagtgtgtatgtgtgtgtatgtgtgtgttttgtaaaatctgtaaatagcacatgaccaaatgaacatattgtatagaactatttttatttgaatgtggcactaaccaccaccaccgttactacgatcaatgtttgcgcatgttcgagatgagtctcaccaacagtgtgtaagtcattaacagtcctaactgtggtgttttcctccaatgccttccaacatccatcaactaacgtgagtattttcttcctgggatttggatgctttagcctaaaggtgactgccaccaagtgagataactgtatgtcactaacttataagccgcctccatggcagatgctgctgtgctccctgatgccctgtgagcaccggggttgcctgtggcgcctgccatgtgactcgggcgcagcatcagctggctggaggtgtggctttcatagacctccacaggctgcctaggacaagatgaccaggagggcccaagccagacaaaagccggagtggggagagaggcatttcagccagaccaacaggctgaaggagctgtgcagactattgctaaaatgagggttcgcagctgccaggagtcatcccagaacattgctacttatttattaaaaagctaaaaactagtgaaagcaagtaactgaaccagtgaactctgggtatcgataggttcgtcttaaataggccacttccccactcccccacccccccttgcttggtcttgtccttggtggctaagacttagctctgcaggggatgttaaagcacagttagtaggacgtggctctgcacagcccaaaaaccagcttactccttagccagggtgtgaggcctcgactatattcttcaaaatgtacttaggctctggttactgggatggccagtagatgtaatgcagatggttggagtttggggagggttaggaggcatcaagcaggacaaggtgctgctgagttcagagggcccacgttcaagggatggaggtggaacctggagaccgactcttaaaagcacagtccgtggttgggtgtggtggctcatgcctgtaagtaagtctcagccctttggaggccacagcagaaggattgcttgagcccaggtactcaaaccagcctgggcaacagagtgaggccctgtcaaaaaaaaatcagccttactgtgaagcctccaaggctgctcgcaggcagctgtggctctcgggaagggaggctgctttgcccagcagggaacatttggggcagggggtaaattttgccagtttgagcatcatgaggtgtaacaagaaatgggttgaatgggccaaatgcaaggagtgcatctctgggctgcaaactgacttgagtgctgcactattgctattccgtgcaaacaaaactcagcttttcctgactcagttccttgacttagtggcctttacaaaaaaagttgagtagtgtgtggcctgctgtcgcacagcccctagttagc

SEQ ID NO: 591 - DNA, 4050 bp, Homo sapiens
tctccgagaaattggggtaaacctcttggctggctctgcattcaggctggtctgtgctaggcttggtatggggttggagcctggacttgggaaatatactgggctgataggaatttgattggattttcttgcagagtcatttcctacagtgtaaagaggacaacccggactttgaaggcgtggattgtgcaatctttgaatccccatacccgatgacaatggcgctctctgttctagtaactatagaaatgtgtaacgccctcaacaggttagtgcaccttcacggcaggctgaggcgagcatggtgactgccagggcaccggggaattgtgtgtagtcacggttgattgaggatcacaggacagttcttcccttcccaaaagaaaggagaacaggcaataccagttttaaaagcatgagctgtcgtcacctccaggaagtagtgggagtgcttagccctgtgtttcttaggagctcttccttaaaagaaaccgtgggggccaaaaataggaactttggtacccctgtatgccagcacccacagggaaggaacctcaccctttcacacagacaaatggtaccatccagttaagcccgtgacaaaaatggaaatttctaaatagcccaagtctccagggcaattgggaacagctttgaacccactaagatggggtctgctatgccaaaacatagatacagaattcacagtttgtcctgcattaggacattctcttcaactttgccactgtagaaagtggaggtaggtcagcggatggtgccacattaacagccgccttactgaagtgtagtccaacagggtcttactgccactgtgacacgtgccttgccttgggggtgcgtttccccacctctccttgctctgcagcttgtccgaaaaccagtccttgctgaggatgcccccctgggagaacatctggctcgtgggctccatctgcctgtccatgtcactccacttcctgatcctctatgtcgaacccttgccagtaagtggttgggtggggcttgggaccagccacctccttccaggggaggctggaggcgtgacacgtcttccctgtgtgtcagctcatcttccagatcacaccgctgaacgtgacccagtggctgatggtgctgaaaatctccttgcccgtgattctcatggatgagacgctcaagtttgtggcccgcaactacctggaacctggtaaagagtgtgtgcagcctgccaccaaatcctgctcgttctcggcatgcaccgatgggatttcctggccgtttgtgctgctcataatgcccctggtgatctgggtctatagcacagacactaactttagcgatatgttctggtcttgactgacagttttccataaagaagatgtttaacttaatcaattaatttttttattgtttaaagcaactgtctatttctgctgaattttcacatgaacatactggctggtgatggaggtttcatactctagattttgttttgctttttctgactccagtggggcaagattttccttttttatacacataattaaagtgtccattgacatgtacagagaactaacactattttatgcaaatatttttttgtagatgaaaaagcatgtacagtgttctgtttaatactcatccttgtataaaaaaaatagttgagccagcagacattgtcagcaaattaattggcagcagattttaggaaatgaatgtgtgtggttttttttctaaaactaaatagcatgtattgtgtcttttgcatgatgatccggatttaatttgatatcacagtctaatttttattcataagccaatttttctgcactgagcagagtcttgctacctcagtcagtattgttttggtttgctacttccctcacccactttggcctccgttcaccccaccccaccccacctctccccaccttacccccgccccgcttggcttcttctttaggattgtgatggttcgttctgtttacatcagttttaacgagaggtatgcctgtactcgcttgtgcagaaaacattgttccagattcaatcgactgggtttatgtcccttcacatagtttttaaggttatttatttaaatgtctaatgtattttattgtaacagacattgttttgccaacattgcctatttcagtggcacgtcatctagttttaaaaaaataaaacattttaaatggacagagaaaaataactgtcttgtctttaactcgtaagtggcttacctgggactaacagacatgtccaactttctctccagttcttagctcagaactttagttgtactctgcttgaggggaagaaggctcctgctctgctgtgtaggtagtcataggaattgtattcttaatgtacaggcactaattgtcatctgtgatgtacattttatgcaagtttctgctggcctggtatagagaacataagggcaagtgtgtatgtgtgtgtatgtgtgtgttttgtaaaatctgtaaatagcacatgaccaaatgaacatattgtatagaactatttttatttgaatgtggcactaaccaccaccaccgttactacgatcaatgtttgcgcatgttcgagatgagtctcaccaacagtgtgtaagtcattaacagtcctaactgtggtgttttcctccaatgccttccaacatccatcaactaacgtgagtattttcttcctgggatttggatgctttagcctaaaggtgactgccaccaagtgagataactgtatgtcactaacttataagccgcctccatggcagatgctgctgtgctccctgatgccctgtgagcaccggggttgcctgtggcgcctgccatgtgactcgggcgcagcatcagctggctggaggtgtggctttcatagacctccacaggctgcctaggacaagatgaccaggagggcccaagccagacaaaagccggagtggggagagaggcatttcagccagaccaacaggctgaaggagctgtgcagactattgctaaaatgagggttcgcagctgccaggagtcatcccagaacattgctacttatttattaaaaagctaaaaactagtgaaagcaagtaactgaaccagtgaactctgggtatcgataggttcgtcttaaataggccacttccccactcccccacccccccttgcttggtcttgtccttggtggctaagacttagctctgcaggggatgttaaagcacagttagtaggacgtggctctgcacagcccaaaaaccagcttactccttagccagggtgtgaggcctcgactatattcttcaaaatgtacttaggctctggttactgggatggccagtagatgtaatgcagatggttggagtttggggagggttaggaggcatcaagcaggacaaggtgctgctgagttcagagggcccacgttcaagggatggaggtggaacctggagaccgactcttaaaagcacagtccgtggttgggtgtggtggctcatgcctgtaagtaagtctcagccctttggaggccacagcagaaggattgcttgagcccaggtactcaaaccagcctgggcaacagagtgaggccctgtcaaaaaaaaatcagccttactgtgaagcctccaaggctgctcgcaggcagctgtggctctcgggaagggaggctgctttgcccagcagggaacatttggggcagggggtaaattttgccagtttgagcatcatgaggtgtaacaagaaatgggttgaatgggccaaatgcaaggagtgcatctctgggctgcaaactgacttgagtgctgcactattgctattccgtgcaaacaaaactcagcttttcctgactcagttccttgacttagtggcctttacaaaaaaagttgagtagtgtgtggcctgctgtcgcacagcccctagttagcttcatggtttctcagcttcagacccctccagcccacagaggagcccatggagggacccacttcccttggtccagacagctgggagtgggttaggcccactgctgttttgagcagggccacttgctccatttcac

SEQ ID NO: 592 - DNA, 4050 bp, Homo sapiens
ccaggtactcaaaccagcctgggcaacagagtgaggccctgtcaaaaaaaaatcagccttactgtgaagcctccaaggctgctcgcaggcagctgtggctctcgggaagggaggctgctttgcccagcagggaacatttggggcagggggtaaattttgccagtttgagcatcatgaggtgtaacaagaaatgggttgaatgggccaaatgcaaggagtgcatctctgggctgcaaactgacttgagtgctgcactattgctattccgtgcaaacaaaactcagcttttcctgactcagttccttgacttagtggcctttacaaaaaaagttgagtagtgtgtggcctgctgtcgcacagcccctagttagcttcatggtttctcagcttcagacccctccagcccacagaggagcccatggagggacccacttcccttggtccagacagctgggagtgggttaggcccactgctgttttgagcagggccacttgctccatttcactgaaggctttgctgggtgaaaacacttcagcatctcctcctcaggtcaacccataaagaccaggtccagcaccgtggtcttggcacatccctggcctcaggccctcacctaacagtgaggcagcagctgcccagccccgcaatgtgcctgctgtcaggcagctcttgcctgaaacttacttccacattctttcctgatgggcaggtggctgaaggcccagccatcagtgtcgcttgttgccaccccgtgcctcccttggcctctctgagctttgcccagaagaccaacaatcatacataccctaactgggacaccactctgcagaatgcagatgatccattctggaggaagctgtcccttgagctcagtgagctcccaggcaagcagggcatctggccgacttccctcacaacagctgctcccacatcccctcggactggagcttcagccctgactgaggtgggcagacctaagacctgagaccacaagattagctcagtgtctaccaagcatctagccactgtccagggccagagcataccacgtctgcagtgcctgtgagcagagccagcagttgccctgtgactgtaaccaccaaattgtccaaacacccgctgcagttagcaagaagggtaggcttcaccctcctttactgaggagaatgatgcggaggagtttcctctccagggctaggcaaggcaggcgagcagccagaagccgggtgcccacagggcagggacaggaaggctgtgctgctactggctgctcacttctccatcaacctcaccctctgcaccactaaccaagaccttgtcctcttgcctgtctcgctgctttcacagctgcaacgattgtgtctgcctcatggggttttcctccagagcctttattctgtagccagacgacacgaggagtctgtgtcactgagccagtgcttctagatgctaccctgtgtgggcggcacctcagggacagtaaatcagaaatgctggtcttgaaaccttgaaaagatcaagctgaatgttccttttcatctgtcgctgttgatcttcatctatttaaataggtattctaacgtttcctctctgtatttcatgaagctgatttcctctctctttccttttcagcaatactggagtaaccgcttcctaaaccattttgcagaaatgtaagggtgttcggttgcgtgcatgtgcgtttttagcaacacatctaccaaccctgtgcatgactgatgttggggaaaaagaaaagtaaaaaacttcccaactcactttgtgttatgtggaggaaatgtgtattaccaatggggttgttagcttttaaatcaaaatactgattacagatgtacaatttagcttaatcagaaagcctctccagagaagtttggtttctttgctgcaagaggaatgaggctctgtaaccttatctaagaacttggaagccgtcagccaagtcgccacatttctctgcaaaatgtcatagcttatataaatgtacagtattcaattgtaatgcatgccttcggttgtaagtagccagatccctctccagtgacattggaacatgctactttttaattggccctgtacagtttgcttatttataaattcattaaaaacactacaggtgttgaatggttaaaatgtaggcctccagttcattttcagttattttctgagtgtgcagacagctatttcgcactgtattaaatgtaacttatttaatgaaatcagaagcagtagacagatgttggtgcaatacaaatattgtgatgcatttatcttaataaaatgctaaatgtcaatttatcactgcgcatgtttgactttagactgtaaatagagatcagtttgtttctttctgtgctggtaacaatgagcgtcgcacagacatggtttcaggtaaataaatctattctatgataaattctcagtgtggtggtgactgttctgtgggagggggactgatgggcaccaagggcctccactccgcacccgggcctgcccctctacagggaagcaggggaggctcagtctgggcagggtggccatgtgactagaggggacaggaacctcttggactcgacttcacagtagacaggctgactggcagcaggtccgcccatgtgaagcccaccctggctccctaccctttaaggatgggggaagctgagtgtgtgttaccagtggggtcttaaacacacaaggcctcactcgtcagtgtggtgaagaaagccaagactccgcgctctccattgttagcagcctggaaagatctggagactagcaatggagagatgtttcttaggctgttcagatccaaaacttccacattccccgttgttgataggtatgggatggagaggtgaacagaactgaagcagctgttggaattcatttgctggttactttagtgcttatttggcagtgatgggtttgggattgggtttttggttttgcacattccctaagatgattctttatcactttaaaaaataccaggatacaaggatagctggatgattctataaatctaatttttaaaactatcagttctgggtaggcacggtggctcacgcctgcaatcccagcactttgggaggccgaggcaggcagatcacaaggtaggagatcgagaccatcctggctaacacgatgaaaccccgtctctactaaaaaaaattgccgggtgcggtggctcacgcctgtaatcccagcactttgggaggccgaggcgggcgaatcatgaggtcaggagattgagaccatcctggctaacatggtgaaaccccgtctccactaaaaattcaaaaaattagccgggcgtggtggtgggtgcctatagtcccagctactcaggaggctgaggcaggagaacggcatgaacccgggaggcggagcttgcagtgagccgagatcgcaccattgcactccagcctgggtgacagagcaagactccgtctcaaaaaaaaaaaaaaaaaacaacaacgaaaatacaaaaaattagctgggcatggtggcagttgcctgtagtcccagctactcaggaggctgaggcaagagaatgaatggcgtgaacgtgccactgcattccagcctgggcgacacagcgagactctactgatcagttctgctgatggagaaaaaaaatttgataaaatttaacatccattttctaaaaattattcctatgtaccatttattattagaaaccaaaagtgttaacgctttagagttgcattccaagtccactcttgcccactaccaaacactgttctagaggtgctagtcagtacaatcgggcacgagaaggaaaaaatgccttggaatgaacaaaaagcgatcaggggtcatactgggtcaatgttcctagacaggaactattttgttcctagttagaaatgtttaatgattcagggaaaattgacagctgaatgggagtgacatataattcatactgatatatgagaataccaatggtggccttaggccaatcctaacaaacatcaggcagacaaaaaccaaggaagcacaccaaacct

SEQ ID NO: 593 - DNA, 45 bp, Homo sapiens
ttacagaaaacagcatgttctttttatcttggttgacagctcgtg

SEQ ID NO: 594 - DNA, 41 bp, Homo sapiens
ccttcaattcggtatcaaatacattcatcttctctactagg

SEQ ID NO: 595 - DNA, 46 bp, Homo sapiens
cttccaactcgaatgtgggtgcacctgtcaatgacaccttcaggag

SEQ ID NO: 596 - DNA, 45 bp, Homo sapiens
gacgtcacgtcctcatcctgcccgaagatgccgatgcggcgacag

SEQ ID NO: 597 - DNA, 46 bp, Homo sapiens
cggggaggtttattcatgatgtccagatcaggagggttgaacccca

SEQ ID NO: 598 - DNA, 49 bp, Homo sapiens
agttactagaacagagagcgccattgtcatcgggtatggggattcaaag

SEQ ID NO: 599 - DNA, 45 bp, Homo sapiens
agttactagaacagagagcgccattgtcatcgggtatggggattc

SEQ ID NO: 600 - DNA, 42 bp, Homo sapiens
attttcagcaccatcagccactgggtcacgttcagcggtgtg

SEQ ID NO: 601 - DNA, 42 bp, Homo sapiens
ccatcggtgcatgccgagaacgagcaggatttggtggcaggc

SEQ ID NO: 602 - DNA, 4045 bp, Homo sapiens
ctcctgtctcagcctctcgagtagctgggactacaggtgcacgccaccactcagctaatttttgtcttttcggtagagacagggtttcaccattttggtcaggttggtctcaaacttcggacctcaggtgatccacccgcctcggcctctcaaagtgctgggattacaggcgtgagccactgcgcccaggctttttttttttttaattaaaggaaaatataatttctctaattctcttacatctaatacaagtatatcagccatacagatatcctgtattttgtgaaagttttaggaattaaatgattagatcctctcaaatattagaaattaagctcaggctatacatacagcccacagaaatgtatgaaattacaaatcaaaagttttgatggcatgaaggcatattggtaggatgaacaaagaaccacgacacggaatattctaaattactcctcttaccctgcagactgacatctggtttgttgtaagtgtaccagtcttgtctgagcagataacagaagtacaaccaagggtttccacagacgggaggcttcgaacaatggcatttttctttgccattctgcgagttccaagagccaggcaggtggtgatgactgcaggcagaccttcaggaatggctgctacagccagggccactgcaattttaaagtagtaaatagcacctctgatccaggaccctccatgaaccgggtcattgaagtgcccaatatttatgatccagactgcaatgcaaataagggagatgactttggaaagctgttccccaaattcatctagtttttgctgaaggggtgttctctcctgttctgttgccaccatttcatcccggatcttgccaatttcggtgttaactccagttgctaccaccactcccatagctttcccagcagcaatgtttgtaccctaggacagaagtagagaactggtcacaagatgaataccacatcccaacttaaataccgacgctggtttttgactagggcacccagattctctacacattctactaggtcttccactggctactgttcaagcaaccagccatacaactgtgacaacaagcaatgctccatgtgctacttacttatgtcaggcagctctgtactgacccacctagatttctatttgagcccggcttgcagaccatcttcaagcagtgctcttaacccctctgtgttcccaatttttcaaactcatatagttcaactctaagcattctccacttctggctccaacaactcaaggcccctacttttctcactgtaatagaaacggcaactagccccatgggctatcttgacaacccctactcatgtgacagggtccaaaaaccaaagaaatcaaatgtgagcagtctctcccatgccactttaattcctagtgttataagagaaggacatggcttcactattttcagggtacctctatttacttactatgggtagtagtcaggttctcatacaaacccacaaatgtccccaacttaaaatcatttcctcactattcaaagaatttttcacatcaatagaaaaagtgaaatagtaaaatgaacattcatatactttgcacctagactcaccattattaatggtttgccatgtttgctttctctctctctctaaacacgcacctttttattgtgaaccacatacaaatagcagctgtcatctacatcattttgaaaataccctttattggctaaggcttttccaaacaaatctacttttcaactatgtttgcaggtaagagtttgaagatgtataagctagtcattattttttggtcccccaaaacttgccaattaaaagacatctaagtcacacgttatgttactgccatattctgacacctaagactgaccatgaaaagtgtgattatcctttagaatgatagccagtgatggttggcagtgaaaaacataacatttgattaggctttggaaatgtctgtaaataaaaacacatttcataaagtacttacagaaaacagcatgttctttttatcttggttgacagctcgtgggtcagggacgggatcagtgtgcttgatgacagagacagattcacctaagcgggttgtgagacagaaaaaacagatctctgcgacccacaccaagaacctagaacctctcattcatgcccacccattaccactcttgggatactgttagtgtgagaaaaggttggcaaaaggcccaattcattcaaaggaggtaagctgggaaaacttagtaatggaaattaataccagaacaaagggtgtcaggataaaaatcaacacaattccaaaataaaaaagtgaattttcaagtagaatccccattgattattttctggagtaactattcaaattaatttatttttcagtaatcattttatactctgatactgtgactgtattatttacatatatttgttgtatactttaataaatactttaacatatatactgatactttttttttttttcgagacagaggtcttgctctatcacccgggctggtgcaatggcaccatcacaactcactacagcctcaacttcctgggctcaagcaatcttcccaacttggcttcctgaatagctgggattacaggcacccaataccacgccgggttaatttttttggtatttttttgtagagatgaggttttaccatgttgcccagggtggtctccaactcgtggactcaaacaatttgctcatcttgtcctcctcaaagtgctggaattacaggtgtgggccacatctggctatgctctggagtagcaattagcaagtgtactggaaagatcgcatggtaaataaagaactactttttttttttttttgagacggagtcttgctttgttgcccaggctggagtccagtggcacaatcttggcttactgaaacctctgcctcccgggcaattttccagcctcagcctcccaagtagctgggattacaggcatgtgccaccatgcccagctaatttttgtatttttagtagagacaggttttgctatgttggccaaggctggtctcaaactcctgacctgaggtgatccccccacctcggcctcccaaagtgctgggattacaggcatgagacaccatgcccagctgatttcaatttaaaaatcatgtcatagatatataattagggtcaatctgagtaaaatatgtctctaaatgttactttaagttacaggtagcaaacttcactctcaatatttgaccaaaaaaattggttccacaagttagccaaaaactacattatgatttcttaatgaaagaaagataatattcgagaacctctatgaagtttaaatttttttttaaacttttaaagttttttattataggctgggtgtgatgacttatgtctgtaatcccagcactttgggggtttgaggcgggcgatcacttcaggtcaggaggtcaagaccagcctggacaacatggcaaaaccctatctctactaaaaatacaattagccaggtgtggtggtgcatgcctgtaatttcagctactagggaggctgaggcatgagaattacttgaaccccggaagcagaggctgcactgagctgagatcgcgccactgggccacagagtgcaactctgtctttaaaaaaaaaaaaaaaaagattttcattatagagactataactgctctctcaaactcttggccacaagtgatcctactgccgcagcctcccaaagtcctgaaattacaggcatgagccaccgtgaccagcctaaaaagtttttaaatgcctgtaatcccagcactttgggaggccaaggcaggcggatcatgagatcaggagttcgagaccagcctgaccaacacagtgaaaccccgtctctactaaaaatacaaaaataagctgggcatggtggcgcacgcctataatcccagacactcaggtggctgaggcaggagaacagcttgaatccaggaggcagaggttgcagtgagctgagatcacagcactacactatagcctgggcaacagagcgagactccgcctcaaaaa

SEQ ID NO: 603 - DNA, 4041 bp, Homo sapiens
aattccataggaatccaagctccacagctaggagacagtgggcactgaggatgaggctgtttgcaggcaaatggtctggtggacctattagaggaccatgtggctgtgcagaccctggactgcagatagagggtattcactctaagatagtgtaggagggctcttgcccaacaagcaatcaccctgtctgccatataaaaggagcagctgctgctgctgccacacagctcaggaatgatgtttcctgggtggtggtttgtgggggcaggaaccagacatagactttgagagcctgacttacgtccctaagctccttctgctcctccctggctgctctgagagcatcacactccttcctccaatacaatcagcttccgcagttcccattcttgagctgcttctgtagcttgcttcttctctcccacctgtccttggcacccacgtgaccgactgacccacacagactttgtgtattgcaacatcttatctgcatatcacttctcatccaagcaatcatctaccactttggccaggataagataaagggagttatccttcaagtttagccacttcaggccttaatttttttttgagatggggtctgactctgttgcccaggctcaagtgcagtgatgctgcaacctaaactctaggcctcaagtgactctcccgcctcagcttcccaaagtgttgggattacaggtgtgagccactgcgcctggtccacttcaagttcttaagctgagccaagtgacaggcagggggaccagtcttttgaggagacccaggtgctagagactcaatggatggccattcttcaccagcagccgttgcaaagtgtttctactgaggtctaggctccccgggcttgtgaggccacagaaatctaagggcagtactgcaggacaggtccagtatggtggtcttggcaggagggagcagcagctctttgagaggaacctcactcaggtccaactcactgtggagactccccatccttgctactggcccttgtcatagtgatgctggtcgaatgagccctgtctcaaagactctgacaggcagaaaaaggctcagaggccacttatttgttcagtgtatacatgaacaatgtgggtgccctctgccactgccactgccactgccaccaccatcaccacattgacctttggtatttggttatgctggtctcatcaaatgagttaagaaatgtttgatgcccaggcgcggtggctcatgcctgtaatcccagcactttgggaggccgaggtgggcggatcacctgaggtcaggagttcgagaccagcctggctagcatggtgaaacccctttctacgaaaaatacaaaaaattagccaggcgtggtggcgtgtgcctgtaatcccagctactagggaggctaaggcaggagaatcgcttgaacctgggaggtggaggttgcagtgagccaagatcgcgccatggcactccaatctggtgacagagagaaactctgtctcaaaaaaaaaaaaaaaaaaaaggtttaattgaacaggaaaagaaagtgtggtagctgacaggggaaataaggtcaaaggaaagtttcaagatagaaagacactattatttccccctatgctgaagaacatctagtagagatggaaatcaataatgcagcaaagatgttgggaggaggtggcttctgctaggagcaagaacactgttcacagcactatgggagaaggcagcccctgtgggcccagagggtcgctcaaggaaattagctattgattgcttttattttcctggtcaaatacacaggaagagcatcttacctgagagtgaatatggggaaggaaatactgtaagtttgaggagataaggtataattagttttctaagagagtaggacagtgcagacactaagtatatatagtacgactgataagcagcatgaacaataaaccaggttcaaatactcactgagttgcaggcatttgcacgttctattttagaaagacccttcaattcggtatcaaatacattcatcttctctactaggcaagtgagagcagtctctgtagcttctccaactttttcatacacaccctttgcctgtattggttaaaggcacagaaagtagaaaaaagggagaagtacacagataaatttatctttaatattttttttccacaaaagcacaatctgtcctctattacaacactgtaaggccatttttatcctcctctgaaacaggtgacccagataattaaaaacatactcaaagtacaggtgtgcatgtgatcttattctaataagtaggtttttcatttcccttaaatataagatgacatcaaacacagtatttattatttcacccaaatataagaagccactgatcacactattaattcaaagagtgccttcacataataatgtaattccatgtcactgcttatcattctgaagagttcacattctgtctctgacagggactagcttacctttgagacagaaactatatcctttgctttcaggaaagcattttctatcctgggttttattcatttatagtaagtatgctatcaacagaaagaacatcacatatactacaactttaagttaactaactgcaatgctcagtcacagaggatatgtgaaaggctctcagctttctttggtgaggtcatgctggccccaccatcaggttctgaatggaagggggaaacaaaatcaggcacccttgactttcaaaagggaggaaggcaggctagactttcattccacccaccccacccttgaactaggaacagccattccttctaatttatgaagagacttacctcattgtaatccaaagcagagtcattacaaagagcacaaattgttgctaattctaccagaccatcatactggtgacaattcactggtttatcatctttatgcctgcccaaagagaaaacactcttagagcagggtatggtcgccactattgattcctcccgccccctgcccccccgcaattgtttaataatgaaaacagaatttctgggacaacatactggaaaaaattccaaacaatttgatgccagagccaatattagacaaaaacaaaagagagaatgcatctctggtatcagaaatcaatcagtaaaaagaccagaaattcttaattcaattcttccaccactggctacagtgaataacaaacacaaatccctcttgaaagtttggagcccagaagatgcaaaaagatgactggattataacctttggttcatctttcaaagtttttgttttaaaaacatttactactttagtaataagtgttgacttgagccacattcagaaagctgtcttaactttgtagacatgctgcaaatcaatacaaatactaaactgccacaccagatcctttaaatgaggaggagggttactcacacttctccaataggtgcataagttgatccagttatggtaaactcattaagggaacaagtatcaccttccactctgtccagaatgaacatctgtagggggagagcgcatcagagtatttaaaagggatttttaaaaaatgctacacaaataaactacctttgttagcttaggacaaaggcaaacaacctctttcatttacgaaaacaactttaataaaactcactgaggctcactcagcatcagcagtactgtcccttaccctaactagcttaattatattagactgcttcgcccatcacacccccgaccaatcgaacagtatgaaaaacagcatcactgaggtgctgaatgaatgagcagcagtggcaccaaagacacaacaacccacacaaaatccaagttatgaggactcccggtcagcaaaaggtcagttccagagacaagttactctttagattgctcagaatcccaaatttcaaatggctggctgtgagagtggtattaggtagtcctgccttagagctaagcacaaaagcttgggaagaataaactcacatttcagagttgcataaacatttcccgagtaaaataagacaaactgcttctctgctccttcccact

SEQ ID NO: 604 - DNA, 4046 bp, Homo sapiens
ctacagacacaaaaacagcactcccatgtttttaatatttttgctaaattccaacttcagttacctctgggggagaggagagtacacttatagtatgtttcaaaactaagatttttttttaaaagagaagaaagtaaatttaacataatgtatctgggtgaaaatcaggtgaggggaagaatactggaaatgcttcatcaatagccagctcttaaagaacttaaaagcagggtgatccaaacaactgactgattacatcctcaattttcagaaaacttacaataaaaacacgtctcatttaaaaaagagactagatcaccagattgttcctctgggactgatctggaaggcccttctgggttttaaacgactctaggatcttccctgcaagtagcacacaacatgctaaccactgattcaccgaattctagagaaaagacccaaatcatgacaaattccaaattagggagctatgacaaaaaaattcagtggtcaaaattagaggctactatgtgcttgtgtagcctgagtcacctgtacatgttcaaacatgctcaccatagctgtaatctcatcaaaagactgaagaaattctacgattttagacttgtgggagggttcaactcgagcaaaacagcgggcgttcaggcaggcgtctcgctgggcggaggggttgagttcatcaaactcccggcctgtgaaagcttttgacgtcacgtcctcatcctgcccgaagatgccgatgcggcgacagatggccacagcagtgcccttgttgtccccagtgatcatgatgacccggatgcctgcttgccggcacagcttcacggaggaggccacctcgattctcggaggatccagcatgcccacgcagccaacgaaggtcagattggtctaaaataagagcatcactttaaataaaagtggcaagttctagtttttgtcccctagtttgaaaaatgcccagttaaacattgagacaggtttctgcattttttttctttttttttttttgaggcggagtttcgctcttgttgcccaggctggagtgccatggcgcaatctcagctcactgcgacctccgcctcccaggttcaagagactcttctgcctcagcctccagggtagctgggactacaggtatgcgccaccacacctggctaattttgtatttttagtagagatgtggtttctccatgttggtcaggctggtctcaaacccccaaccccaggtgatctgccagcctcggcctcccaaagtgctgagattacaggcatttgagccaccgtgcctggcggtttttgcattttcttatgagaaaaaaaaataccactacacccgttatcaaaccattctttaactcttgtgctattctgagcccacagtaccaaagcttcttcattttgttcatagctttaggatgtcacatccttgatataaaagaattctactctgagtagaaaagtggaagtaatctccaacttggatcttttgaccttcagtaactaatgaatattctagaaatgtcaccaatttaaaaaaaatcatgatttagatgagaggcaaaatggggtttacaagcttaagctcatcttgattattctactttgaaaatattctactttgaaaataacacttttatgaaattattaactatgtatgtttgaagcagcaaattttaagggtgacacagctggcaggcagaaaaacaaataaccacacctctttcttggcaaaagtgagaactgtttgaccttttgcttgaaggagtactgtttaaacacaatgaatcgtgcagggtgtggacaaagaaacttttcattagctaacctcatatttaataaagttggcagagtcctcaaggtgcatttcttctcttctcagtgggttgtcatgagtggccagggccaggcatcgcagtgtgtcgctgccactaccccactctcgaatgacagacatgatcttctgtttgactccagaggtcataggaaccttagtacttccaactcgaatgtgggtgcacctgtcaatgacaccttcaggagcaccctggaaatgttacagatttagataaacaattttgttttattggttcaccgggatcttaaccctggcaagaacatctcaattgcaatctgccatacttgccttcacaaacatcttgctcattgatgtcctgcttggtttatttggtgtacagtaaaccgacattgactttctgtcacgtgaaaactctagagtgaattcctttttcatcagctgtttaatgacctacaaagggaacaaatatggatactactgggtggcaatttctgaacttttttacctaacaagcagtaagcacacctattacatgacagatgctaggaatatagcaataaacaaaacagacaggtttttgccctcatgaaacttgtcccctattttgggagagacagactaagatgcaaaagtaacacaagtgctatagagaaaaagggaagggggatagaaaatttgcatacatacatatgaactgttacataaagtggccagaaggcggtgacatttgaataaagatggccccatggggcctgaaaagatgtgtgtgaacccagtgggtggtggtgaagacccaccaggcagagaacggaagtgcaacctggcaagtcctggaatggtaaaggagtgccaacgtggctggaatagagtttacatgagcaaaaggtgaggcaggtaatggcagaggatggtagaagcaggtcattaagacctcaaaagtcattatggggcatttggcttttaagacaagtaaaacagaagacaacggagggtctcaagctccagttgtcaagaattggctgaaggtggtcgggtgcagtggatcacctgaggtcagcagttcatgaccagcctggccaacatggtgaaaccctgtctacaaaaattagctaggtgtggtggcaggcacctgtaatcccagctactcaggaggccgaggcaggagaactgcttaaagccaggggggcagagattccagtgagatgagattgcgccacttcactccaccctggacgaaagagcaaactccatctcaaaaaacaaaagcattggctgaagggagacaaggaataccattcagtataatgacactgacttaaactagggaacgttggaggtgaagagatggccccaagcagagctgtccaccagaactctgtgaaagatggcaatgctctgtggccactgttcatgtggctgtcacacgtgatggataagcactttaagtgaatatggctagggcatctaaggaagtgtttttaggtattctaagtagttttagatagctagtggctactgattatagtaatgagaccagaagagatcatgggagtaactatagacagaaatggctgaggactatggagccttcacctcctggtgccttgtgaaagacccagctacaaagacctcgaatgagaggccagggagggagagcaagtatgggatcgtggaagccaagtgaagaggtgcttcaaagagggagcgagtgacagcaccaacaaaataggaagacgaagactgagaataaacctttggctttatatcgttacctacaactaaagataccccttctcttccagtttttgtacttttcttgcctattacacagaccaggaatgccagtataatactgcatagaaatggtgagaattctgttatgttagcatggtctctgtgtaaacacactgtcagcgttaaagacacacttttatagtcttagtttggtgtgataagatgcgtttcatcatatgcacctactgaggtgaccttattgttttttccaccttaatttggttaatgtggtgagttaattatatttgctcccactgacacacatttaaaaatcatcatagaaatccccaagaacatcagcatctaacctaggaagctacgggaggactgaaggctgatgaactgactagatggggctcagggccctgcagcgatcctgctggcctgccagccactgaaccgtctcaggcagcaaaggaatgggtatgag

SEQ ID NO: 605 - DNA, 4045 bp, Homo sapiens
gtggaggggacagtgagctgagatcgtgccactgcccgaagcctgggcgacagcgagactgtctcaaaaaaataaataaaaataaaaaaattattaagctgactgagataaagccaacttttggagggcaagaatttcatgtgactacctggttaatgttagctcagtctcacgttaaagaggattctttgcacattggggcagctgcagacaaccctcccgagggccaaagcaccactgcttccataaggcatttctgtcttgcccactcccctcttccaactcaggcacaaagaccaaagctgctgcaatctggagagcaaactgcgagaactgggctccatgacccatttagataaaggcgtacagtaagtgatgctgtcacagagacctaccagacaacttccccgacgttggacgagatgaggtagcggatgaactgtttcatgttgttgtagattgcccgcccctcctcaacggcagccacaatggtggagaagttgtcatccgccaggaccatctcagaggcggttttagccaccgcagtgccagagcccatagcaatgccaatctcggctttcttcagagcaggagcatcgttcacgccatcgccagtctgaaagggaaagcaatggttgggtcagccaactggcatgccacattcatacccctaggcaaaagcccactgaatgggaagcaggaggaaaatgaatagagccgtaggtctcttggcaaagagttttagaatttttgtttcataagttggtgtcacaaaacacattttacctaggaaatgtaaaattaccaaataagtttaccgaagtgggacaaaggggacttcaaatttatctgtattatcttactaaaaacaaaaacacaacctatgtggcagtcaagaggaagcacttgtatccacatggataaatttcaagtagaaagatgcagattgcaaaaatatgcaaatttttatttttctgagatggagtcccgctctgtcgcccaggctgtagtgcagtggcgcagtctcggctcactgcacgcctcctgggttcaagcgattctcctgcctcaatctcccgagtagctgggattacaggcgcccaccaccacacccagcaattttttgtatttttagtacagacggggtttcaccatgttggccaggctggtcttgaactcctgaccccaagtgattcacctgcctcggcctcccaagtgttggggttacaggcatgagccactgcactcggccaaaaaatatgccttcaaaagcatgcaaaaataatactgtctacagacacaaaaacagcactcccatgtttttaatatttttgctaaattccaacttcagttacctctgggggagaggagagtacacttatagtatgtttcaaaactaagatttttttttaaaagagaagaaagtaaatttaacataatgtatctgggtgaaaatcaggtgaggggaagaatactggaaatgcttcatcaatagccagctcttaaagaacttaaaagcagggtgatccaaacaactgactgattacatcctcaattttcagaaaacttacaataaaaacacgtctcatttaaaaaagagactagatcaccagattgttcctctgggactgatctggaaggcccttctgggttttaaacgactctaggatcttccctgcaagtagcacacaacatgctaaccactgattcaccgaattctagagaaaagacccaaatcatgacaaattccaaattagggagctatgacaaaaaaattcagtggtcaaaattagaggctactatgtgcttgtgtagcctgagtcacctgtacatgttcaaacatgctcaccatagctgtaatctcatcaaaagactgaagaaattctacgattttagacttgtgggagggttcaactcgagcaaaacagcgggcgttcaggcaggcgtctcgctgggcggaggggttgagttcatcaaactcccggcctgtgaaagcttttgacgtcacgtcctcatcctgcccgaagatgccgatgcggcgacagatggccacagcagtgcccttgttgtccccagtgatcatgatgacccggatgcctgcttgccggcacagcttcacggaggaggccacctcgattctcggaggatccagcatgcccacgcagccaacgaaggtcagattggtctaaaataagagcatcactttaaataaaagtggcaagttctagtttttgtcccctagtttgaaaaatgcccagttaaacattgagacaggtttctgcattttttttctttttttttttttgaggcggagtttcgctcttgttgcccaggctggagtgccatggcgcaatctcagctcactgcgacctccgcctcccaggttcaagagactcttctgcctcagcctccagggtagctgggactacaggtatgcgccaccacacctggctaattttgtatttttagtagagatgtggtttctccatgttggtcaggctggtctcaaacccccaaccccaggtgatctgccagcctcggcctcccaaagtgctgagattacaggcatttgagccaccgtgcctggcggtttttgcattttcttatgagaaaaaaaaataccactacacccgttatcaaaccattctttaactcttgtgctattctgagcccacagtaccaaagcttcttcattttgttcatagctttaggatgtcacatccttgatataaaagaattctactctgagtagaaaagtggaagtaatctccaacttggatcttttgaccttcagtaactaatgaatattctagaaatgtcaccaatttaaaaaaaatcatgatttagatgagaggcaaaatggggtttacaagcttaagctcatcttgattattctactttgaaaatattctactttgaaaataacacttttatgaaattattaactatgtatgtttgaagcagcaaattttaagggtgacacagctggcaggcagaaaaacaaataaccacacctctttcttggcaaaagtgagaactgtttgaccttttgcttgaaggagtactgtttaaacacaatgaatcgtgcagggtgtggacaaagaaacttttcattagctaacctcatatttaataaagttggcagagtcctcaaggtgcatttcttctcttctcagtgggttgtcatgagtggccagggccaggcatcgcagtgtgtcgctgccactaccccactctcgaatgacagacatgatcttctgtttgactccagaggtcataggaaccttagtacttccaactcgaatgtgggtgcacctgtcaatgacaccttcaggagcaccctggaaatgttacagatttagataaacaattttgttttattggttcaccgggatcttaaccctggcaagaacatctcaattgcaatctgccatacttgccttcacaaacatcttgctcattgatgtcctgcttggtttatttggtgtacagtaaaccgacattgactttctgtcacgtgaaaactctagagtgaattcctttttcatcagctgtttaatgacctacaaagggaacaaatatggatactactgggtggcaatttctgaacttttttacctaacaagcagtaagcacacctattacatgacagatgctaggaatatagcaataaacaaaacagacaggtttttgccctcatgaaacttgtcccctattttgggagagacagactaagatgcaaaagtaacacaagtgctatagagaaaaagggaagggggatagaaaatttgcatacatacatatgaactgttacataaagtggccagaaggcggtgacatttgaataaagatggccccatggggcctgaaaagatgtgtgtgaacccagtgggtggtggtgaagacccaccaggcagagaacggaagtgcaacctggcaagtcctggaatggtaaaggagtgccaacgtggctggaatagagtttacatgagcaaaaggtgaggcaggtaatggcagaggatggtagaagcaggtcattaagacc

SEQ ID NO: 606 - DNA, 4046 bp, Homo sapiens
gggcgttacacatttctatagttactagaacagagagcgccattgtcatcgggtatggggattcaaagattgcacaatccacgccttcaaagtccgggttgtcctctttacactgtaggaaatgactctgcaagaaaatccaatcaaattcctatcagcccagtatatttcccaagtccaggctccaaccccataccaagcctagcacagaccagcctgaatgcagagccagccaagaggtttaccccaatttctcggagaagccctggtccttcagaatcatcttagatgtaactgtttattgtctgagtcttaagatgatttgatagataccgaaaccacagaaaggtcaaggcctcacaacacttctcatgtaaggtacagaaagaaaggtgactgagtaccagctggtagaaggacactcttggaccaccgtcagcagcaatgaaccaccatgcagcagcacccacggtagcagcgccgacgtaacctgggaacaaacacagtgatgctgatgcacttgcctctgcagggctcgctgccaccgaggccatgcaggccagtccccacaaggacgaagatcaaagacatgggacagtgatggtaaccggggcctgtggtgctaccaccacctgctcacgcctggtagccagagcaactagaccctggtttctgaaggacaggggtgtttctagaacagaagaactggataacttttcctccagaatgtgtgagaaaaagcacttgctccatcctgtgccaacctttccccttgccgtgccttctcccctcagtgggtagtacttcaaggctgcaagtgtgtgtgtactccatgtaaggctgcacagtttgagggactagattacaccaggacttttggacaaactattgctgcctagttgtacacagatttatttgctccattagaggcccagcagcagttttctagggaaatgctgtcaggagctagggtggaacactgagcagcatggccctgccctcagcagcttctgggattccccccagtattagctttgagttcaggaagtttattgcaaagaagcaacaaggtgcagcagagaatacacagagttcagacgaggcaaatatccccatgtggtagcatcaaaaacaacaagtgcatatacccactaacccacgaattacagtggagcatgaaggccgctggctgcaaggatgaggcactacgcatgtccggatatggaaggatctgacaagcaggaagaaggcaagacaagggtcaacatgcaggtgtgcacagcatgctggaatctctccggaagggcacagggtacatgagcacctcaacgccagagggaagtgactggcccaaaccctttccattctatgccattgtgtgctttttgaatttgaagtcatgtgaatatattatgaaaacacaatgccttcctatgggatcccagggaagtgatttcacctcactttcccaatctatgaaatggggaagaacccggggtgaggaagatgagggctaaagagatgatttatatataaaagggaccagccactgcgcaacccttctcttatggaaacagggactaaattttataacttggtgacaattatctatttaaatcccacctatgaactcttggaaggcagaacctagcgtgaatcattcttatccctttgcacagagggctcaatctgaaaaccctgatgtttaattgctcattcagaaaagcccaagtaagggcaggatgctaaaactggaactaactgtgaaaggactctggtaaattggatgtatagttcatcgaactgtaagagggcatctctgtcttttgctaccctatacggggatagaagaaaaaacacgcttttaagggatgaatttacaaaatttcagctcacaaacattttgtttaaaaatcagtaatataaaaaaattgtactcacagccaatagccaagtaacggaaaaagagccacccgctgatcaatggttcctttgggttccggggaggtttattcatgatgtccagatcaggagggttgaaccccagtgcagtggcaggcaggccatctgtcaccagattgacccagagcagctgaacaggaatcaaagcctcgggaaatccaagggctgctgtcaggaaaatactgtttccaatcaagaaaagaagacaaagagagcccaaatgacttctggccactatttaaagagcatcatcaacccgccctcctccagaaaaataaatgacaacaacttcaggtaatctgtaaaatacttatacccaattttgaattaaagctcaattttacttagtttattacttaaattcagatgactgaggccaggtgcggtggcttatgcctgtaatcccagcactttgggaagccaaggtgggcagactggctgagctcagcagttaagagaccagcctgggcaacatggtgaaacctcatttctactaaaacacaaaaaaatggcagggagtggtggcgcatgcctgtaatcccagctgttcgggaggcttgaacccaggaggtggaggggacagtgagctgagatcgtgccactgcccgaagcctgggcgacagcgagactgtctcaaaaaaataaataaaaataaaaaaattattaagctgactgagataaagccaacttttggagggcaagaatttcatgtgactacctggttaatgttagctcagtctcacgttaaagaggattctttgcacattggggcagctgcagacaaccctcccgagggccaaagcaccactgcttccataaggcatttctgtcttgcccactcccctcttccaactcaggcacaaagaccaaagctgctgcaatctggagagcaaactgcgagaactgggctccatgacccatttagataaaggcgtacagtaagtgatgctgtcacagagacctaccagacaacttccccgacgttggacgagatgaggtagcggatgaactgtttcatgttgttgtagattgcccgcccctcctcaacggcagccacaatggtggagaagttgtcatccgccaggaccatctcagaggcggttttagccaccgcagtgccagagcccatagcaatgccaatctcggctttcttcagagcaggagcatcgttcacgccatcgccagtctgaaagggaaagcaatggttgggtcagccaactggcatgccacattcatacccctaggcaaaagcccactgaatgggaagcaggaggaaaatgaatagagccgtaggtctcttggcaaagagttttagaatttttgtttcataagttggtgtcacaaaacacattttacctaggaaatgtaaaattaccaaataagtttaccgaagtgggacaaaggggacttcaaatttatctgtattatcttactaaaaacaaaaacacaacctatgtggcagtcaagaggaagcacttgtatccacatggataaatttcaagtagaaagatgcagattgcaaaaatatgcaaatttttatttttctgagatggagtcccgctctgtcgcccaggctgtagtgcagtggcgcagtctcggctcactgcacgcctcctgggttcaagcgattctcctgcctcaatctcccgagtagctgggattacaggcgcccaccaccacacccagcaattttttgtatttttagtacagacggggtttcaccatgttggccaggctggtcttgaactcctgaccccaagtgattcacctgcctcggcctcccaagtgttggggttacaggcatgagccactgcactcggccaaaaaatatgccttcaaaagcatgcaaaaataatactgtctacagacacaaaaacagcactcccatgtttttaatatttttgctaaattccaacttcagttacctctgggggagaggagagtacacttatagtatgtttcaaaactaagatttttttttaaaagagaagaaagtaaatttaacataatgtatctgggtgaaaatcaggtgaggggaagaatactggaaatgcttcatcaatagccagctcttaaagaactta

SEQ ID NO: 607 - DNA, 4049 bp, Homo sapiens
taagccacttacgagttaaagacaagacagttatttttctctgtccatttaaaatgttttatttttttaaaactagatgacgtgccactgaaataggcaatgttggcaaaacaatgtctgttacaataaaatacattagacatttaaataaataaccttaaaaactatgtgaagggacataaacccagtcgattgaatctggaacaatgttttctgcacaagcgagtacaggcatacctctcgttaaaactgatgtaaacagaacgaaccatcacaatcctaaagaagaagccaagcggggcgggggtaaggtggggagaggtggggtggggtggggtgaacggaggccaaagtgggtgagggaagtagcaaaccaaaacaatactgactgaggtagcaagactctgctcagtgcagaaaaattggcttatgaataaaaattagactgtgatatcaaattaaatccggatcatcatgcaaaagacacaatacatgctatttagttttagaaaaaaaaccacacacattcatttcctaaaatctgctgccaattaatttgctgacaatgtctgctggctcaactattttttttatacaaggatgagtattaaacagaacactgtacatgctttttcatctacaaaaaaatatttgcataaaatagtgttagttctctgtacatgtcaatggacactttaattatgtgtataaaaaaggaaaatcttgccccactggagtcagaaaaagcaaaacaaaatctagagtatgaaacctccatcaccagccagtatgttcatgtgaaaattcagcagaaatagacagttgctttaaacaataaaaaaattaattgattaagttaaacatcttctttatggaaaactgtcagtcaagaccagaacatatcgctaaagttagtgtctgtgctatagacccagatcaccaggggcattatgagcagcacaaacggccaggaaatcccatcggtgcatgccgagaacgagcaggatttggtggcaggctgcacacactctttaccaggttccaggtagttgcgggccacaaacttgagcgtctcatccatgagaatcacgggcaaggagattttcagcaccatcagccactgggtcacgttcagcggtgtgatctggaagatgagctgacacacagggaagacgtgtcacgcctccagcctcccctggaaggaggtggctggtcccaagccccacccaaccacttactggcaagggttcgacatagaggatcaggaagtggagtgacatggacaggcagatggagcccacgagccagatgttctcccaggggggcatcctcagcaaggactggttttcggacaagctgcagagcaaggagaggtggggaaacgcacccccaaggcaaggcacgtgtcacagtggcagtaagaccctgttggactacacttcagtaaggcggctgttaatgtggcaccatccgctgacctacctccactttctacagtggcaaagttgaagagaatgtcctaatgcaggacaaactgtgaattctgtatctatgttttggcatagcagaccccatcttagtgggttcaaagctgttcccaattgccctggagacttgggctatttagaaatttccatttttgtcacgggcttaactggatggtaccatttgtctgtgtgaaagggtgaggttccttccctgtgggtgctggcatacaggggtaccaaagttcctatttttggcccccacggtttcttttaaggaagagctcctaagaaacacagggctaagcactcccactacttcctggaggtgacgacagctcatgcttttaaaactggtattgcctgttctcctttcttttgggaagggaagaactgtcctgtgatcctcaatcaaccgtgactacacacaattccccggtgccctggcagtcaccatgctcgcctcagcctgccgtgaaggtgcactaacctgttgagggcgttacacatttctatagttactagaacagagagcgccattgtcatcgggtatggggattcaaagattgcacaatccacgccttcaaagtccgggttgtcctctttacactgtaggaaatgactctgcaagaaaatccaatcaaattcctatcagcccagtatatttcccaagtccaggctccaaccccataccaagcctagcacagaccagcctgaatgcagagccagccaagaggtttaccccaatttctcggagaagccctggtccttcagaatcatcttagatgtaactgtttattgtctgagtcttaagatgatttgatagataccgaaaccacagaaaggtcaaggcctcacaacacttctcatgtaaggtacagaaagaaaggtgactgagtaccagctggtagaaggacactcttggaccaccgtcagcagcaatgaaccaccatgcagcagcacccacggtagcagcgccgacgtaacctgggaacaaacacagtgatgctgatgcacttgcctctgcagggctcgctgccaccgaggccatgcaggccagtccccacaaggacgaagatcaaagacatgggacagtgatggtaaccggggcctgtggtgctaccaccacctgctcacgcctggtagccagagcaactagaccctggtttctgaaggacaggggtgtttctagaacagaagaactggataacttttcctccagaatgtgtgagaaaaagcacttgctccatcctgtgccaacctttccccttgccgtgccttctcccctcagtgggtagtacttcaaggctgcaagtgtgtgtgtactccatgtaaggctgcacagtttgagggactagattacaccaggacttttggacaaactattgctgcctagttgtacacagatttatttgctccattagaggcccagcagcagttttctagggaaatgctgtcaggagctagggtggaacactgagcagcatggccctgccctcagcagcttctgggattccccccagtattagctttgagttcaggaagtttattgcaaagaagcaacaaggtgcagcagagaatacacagagttcagacgaggcaaatatccccatgtggtagcatcaaaaacaacaagtgcatatacccactaacccacgaattacagtggagcatgaaggccgctggctgcaaggatgaggcactacgcatgtccggatatggaaggatctgacaagcaggaagaaggcaagacaagggtcaacatgcaggtgtgcacagcatgctggaatctctccggaagggcacagggtacatgagcacctcaacgccagagggaagtgactggcccaaaccctttccattctatgccattgtgtgctttttgaatttgaagtcatgtgaatatattatgaaaacacaatgccttcctatgggatcccagggaagtgatttcacctcactttcccaatctatgaaatggggaagaacccggggtgaggaagatgagggctaaagagatgatttatatataaaagggaccagccactgcgcaacccttctcttatggaaacagggactaaattttataacttggtgacaattatctatttaaatcccacctatgaactcttggaaggcagaacctagcgtgaatcattcttatccctttgcacagagggctcaatctgaaaaccctgatgtttaattgctcattcagaaaagcccaagtaagggcaggatgctaaaactggaactaactgtgaaaggactctggtaaattggatgtatagttcatcgaactgtaagagggcatctctgtcttttgctaccctatacggggatagaagaaaaaacacgcttttaagggatgaatttacaaaatttcagctcacaaacattttgtttaaaaatcagtaatataaaaaaattgtactcacagccaatagccaagtaacggaaaaagagccacccgctgatcaatggttcctttgggttccggggaggtttattcatgatgtccagatcaggagggttgaaccccagtgcagtggcaggcaggccatc

SEQ ID NO: 608 - DNA, 4045 bp, Homo sapiens
taagccacttacgagttaaagacaagacagttatttttctctgtccatttaaaatgttttatttttttaaaactagatgacgtgccactgaaataggcaatgttggcaaaacaatgtctgttacaataaaatacattagacatttaaataaataaccttaaaaactatgtgaagggacataaacccagtcgattgaatctggaacaatgttttctgcacaagcgagtacaggcatacctctcgttaaaactgatgtaaacagaacgaaccatcacaatcctaaagaagaagccaagcggggcgggggtaaggtggggagaggtggggtggggtggggtgaacggaggccaaagtgggtgagggaagtagcaaaccaaaacaatactgactgaggtagcaagactctgctcagtgcagaaaaattggcttatgaataaaaattagactgtgatatcaaattaaatccggatcatcatgcaaaagacacaatacatgctatttagttttagaaaaaaaaccacacacattcatttcctaaaatctgctgccaattaatttgctgacaatgtctgctggctcaactattttttttatacaaggatgagtattaaacagaacactgtacatgctttttcatctacaaaaaaatatttgcataaaatagtgttagttctctgtacatgtcaatggacactttaattatgtgtataaaaaaggaaaatcttgccccactggagtcagaaaaagcaaaacaaaatctagagtatgaaacctccatcaccagccagtatgttcatgtgaaaattcagcagaaatagacagttgctttaaacaataaaaaaattaattgattaagttaaacatcttctttatggaaaactgtcagtcaagaccagaacatatcgctaaagttagtgtctgtgctatagacccagatcaccaggggcattatgagcagcacaaacggccaggaaatcccatcggtgcatgccgagaacgagcaggatttggtggcaggctgcacacactctttaccaggttccaggtagttgcgggccacaaacttgagcgtctcatccatgagaatcacgggcaaggagattttcagcaccatcagccactgggtcacgttcagcggtgtgatctggaagatgagctgacacacagggaagacgtgtcacgcctccagcctcccctggaaggaggtggctggtcccaagccccacccaaccacttactggcaagggttcgacatagaggatcaggaagtggagtgacatggacaggcagatggagcccacgagccagatgttctcccaggggggcatcctcagcaaggactggttttcggacaagctgcagagcaaggagaggtggggaaacgcacccccaaggcaaggcacgtgtcacagtggcagtaagaccctgttggactacacttcagtaaggcggctgttaatgtggcaccatccgctgacctacctccactttctacagtggcaaagttgaagagaatgtcctaatgcaggacaaactgtgaattctgtatctatgttttggcatagcagaccccatcttagtgggttcaaagctgttcccaattgccctggagacttgggctatttagaaatttccatttttgtcacgggcttaactggatggtaccatttgtctgtgtgaaagggtgaggttccttccctgtgggtgctggcatacaggggtaccaaagttcctatttttggcccccacggtttcttttaaggaagagctcctaagaaacacagggctaagcactcccactacttcctggaggtgacgacagctcatgcttttaaaactggtattgcctgttctcctttcttttgggaagggaagaactgtcctgtgatcctcaatcaaccgtgactacacacaattccccggtgccctggcagtcaccatgctcgcctcagcctgccgtgaaggtgcactaacctgttgagggcgttacacatttctatagttactagaacagagagcgccattgtcatcgggtatggggattcaaagattgcacaatccacgccttcaaagtccgggttgtcctctttacactgtaggaaatgactctgcaagaaaatccaatcaaattcctatcagcccagtatatttcccaagtccaggctccaaccccataccaagcctagcacagaccagcctgaatgcagagccagccaagaggtttaccccaatttctcggagaagccctggtccttcagaatcatcttagatgtaactgtttattgtctgagtcttaagatgatttgatagataccgaaaccacagaaaggtcaaggcctcacaacacttctcatgtaaggtacagaaagaaaggtgactgagtaccagctggtagaaggacactcttggaccaccgtcagcagcaatgaaccaccatgcagcagcacccacggtagcagcgccgacgtaacctgggaacaaacacagtgatgctgatgcacttgcctctgcagggctcgctgccaccgaggccatgcaggccagtccccacaaggacgaagatcaaagacatgggacagtgatggtaaccggggcctgtggtgctaccaccacctgctcacgcctggtagccagagcaactagaccctggtttctgaaggacaggggtgtttctagaacagaagaactggataacttttcctccagaatgtgtgagaaaaagcacttgctccatcctgtgccaacctttccccttgccgtgccttctcccctcagtgggtagtacttcaaggctgcaagtgtgtgtgtactccatgtaaggctgcacagtttgagggactagattacaccaggacttttggacaaactattgctgcctagttgtacacagatttatttgctccattagaggcccagcagcagttttctagggaaatgctgtcaggagctagggtggaacactgagcagcatggccctgccctcagcagcttctgggattccccccagtattagctttgagttcaggaagtttattgcaaagaagcaacaaggtgcagcagagaatacacagagttcagacgaggcaaatatccccatgtggtagcatcaaaaacaacaagtgcatatacccactaacccacgaattacagtggagcatgaaggccgctggctgcaaggatgaggcactacgcatgtccggatatggaaggatctgacaagcaggaagaaggcaagacaagggtcaacatgcaggtgtgcacagcatgctggaatctctccggaagggcacagggtacatgagcacctcaacgccagagggaagtgactggcccaaaccctttccattctatgccattgtgtgctttttgaatttgaagtcatgtgaatatattatgaaaacacaatgccttcctatgggatcccagggaagtgatttcacctcactttcccaatctatgaaatggggaagaacccggggtgaggaagatgagggctaaagagatgatttatatataaaagggaccagccactgcgcaacccttctcttatggaaacagggactaaattttataacttggtgacaattatctatttaaatcccacctatgaactcttggaaggcagaacctagcgtgaatcattcttatccctttgcacagagggctcaatctgaaaaccctgatgtttaattgctcattcagaaaagcccaagtaagggcaggatgctaaaactggaactaactgtgaaaggactctggtaaattggatgtatagttcatcgaactgtaagagggcatctctgtcttttgctaccctatacggggatagaagaaaaaacacgcttttaagggatgaatttacaaaatttcagctcacaaacattttgtttaaaaatcagtaatataaaaaaattgtactcacagccaatagccaagtaacggaaaaagagccacccgctgatcaatggttcctttgggttccggggaggtttattcatgatgtccagatcaggagggttgaaccccagtgcagtggcaggcaggc

SEQ ID NO: 609 - DNA, 4042 bp, Homo sapiens
ggaagtggcctatttaagacgaacctatcgatacccagagttcactggttcagttacttgctttcactagtttttagctttttaataaataagtagcaatgttctgggatgactcctggcagctgcgaaccctcattttagcaatagtctgcacagctccttcagcctgttggtctggctgaaatgcctctctccccactccggcttttgtctggcttgggccctcctggtcatcttgtcctaggcagcctgtggaggtctatgaaagccacacctccagccagctgatgctgcgcccgagtcacatggcaggcgccacaggcaaccccggtgctcacagggcatcagggagcacagcagcatctgccatggaggcggcttataagttagtgacatacagttatctcacttggtggcagtcacctttaggctaaagcatccaaatcccaggaagaaaatactcacgttagttgatggatgttggaaggcattggaggaaaacaccacagttaggactgttaatgacttacacactgttggtgagactcatctcgaacatgcgcaaacattgatcgtagtaacggtggtggtggttagtgccacattcaaataaaaatagttctatacaatatgttcatttggtcatgtgctatttacagattttacaaaacacacacatacacacacatacacacttgcccttatgttctctataccaggccagcagaaacttgcataaaatgtacatcacagatgacaattagtgcctgtacattaagaatacaattcctatgactacctacacagcagagcaggagccttcttcccctcaagcagagtacaactaaagttctgagctaagaactggagagaaagttggacatgtctgttagtcccaggtaagccacttacgagttaaagacaagacagttatttttctctgtccatttaaaatgttttatttttttaaaactagatgacgtgccactgaaataggcaatgttggcaaaacaatgtctgttacaataaaatacattagacatttaaataaataaccttaaaaactatgtgaagggacataaacccagtcgattgaatctggaacaatgttttctgcacaagcgagtacaggcatacctctcgttaaaactgatgtaaacagaacgaaccatcacaatcctaaagaagaagccaagcggggcgggggtaaggtggggagaggtggggtggggtggggtgaacggaggccaaagtgggtgagggaagtagcaaaccaaaacaatactgactgaggtagcaagactctgctcagtgcagaaaaattggcttatgaataaaaattagactgtgatatcaaattaaatccggatcatcatgcaaaagacacaatacatgctatttagttttagaaaaaaaaccacacacattcatttcctaaaatctgctgccaattaatttgctgacaatgtctgctggctcaactattttttttatacaaggatgagtattaaacagaacactgtacatgctttttcatctacaaaaaaatatttgcataaaatagtgttagttctctgtacatgtcaatggacactttaattatgtgtataaaaaaggaaaatcttgccccactggagtcagaaaaagcaaaacaaaatctagagtatgaaacctccatcaccagccagtatgttcatgtgaaaattcagcagaaatagacagttgctttaaacaataaaaaaattaattgattaagttaaacatcttctttatggaaaactgtcagtcaagaccagaacatatcgctaaagttagtgtctgtgctatagacccagatcaccaggggcattatgagcagcacaaacggccaggaaatcccatcggtgcatgccgagaacgagcaggatttggtggcaggctgcacacactctttaccaggttccaggtagttgcgggccacaaacttgagcgtctcatccatgagaatcacgggcaaggagattttcagcaccatcagccactgggtcacgttcagcggtgtgatctggaagatgagctgacacacagggaagacgtgtcacgcctccagcctcccctggaaggaggtggctggtcccaagccccacccaaccacttactggcaagggttcgacatagaggatcaggaagtggagtgacatggacaggcagatggagcccacgagccagatgttctcccaggggggcatcctcagcaaggactggttttcggacaagctgcagagcaaggagaggtggggaaacgcacccccaaggcaaggcacgtgtcacagtggcagtaagaccctgttggactacacttcagtaaggcggctgttaatgtggcaccatccgctgacctacctccactttctacagtggcaaagttgaagagaatgtcctaatgcaggacaaactgtgaattctgtatctatgttttggcatagcagaccccatcttagtgggttcaaagctgttcccaattgccctggagacttgggctatttagaaatttccatttttgtcacgggcttaactggatggtaccatttgtctgtgtgaaagggtgaggttccttccctgtgggtgctggcatacaggggtaccaaagttcctatttttggcccccacggtttcttttaaggaagagctcctaagaaacacagggctaagcactcccactacttcctggaggtgacgacagctcatgcttttaaaactggtattgcctgttctcctttcttttgggaagggaagaactgtcctgtgatcctcaatcaaccgtgactacacacaattccccggtgccctggcagtcaccatgctcgcctcagcctgccgtgaaggtgcactaacctgttgagggcgttacacatttctatagttactagaacagagagcgccattgtcatcgggtatggggattcaaagattgcacaatccacgccttcaaagtccgggttgtcctctttacactgtaggaaatgactctgcaagaaaatccaatcaaattcctatcagcccagtatatttcccaagtccaggctccaaccccataccaagcctagcacagaccagcctgaatgcagagccagccaagaggtttaccccaatttctcggagaagccctggtccttcagaatcatcttagatgtaactgtttattgtctgagtcttaagatgatttgatagataccgaaaccacagaaaggtcaaggcctcacaacacttctcatgtaaggtacagaaagaaaggtgactgagtaccagctggtagaaggacactcttggaccaccgtcagcagcaatgaaccaccatgcagcagcacccacggtagcagcgccgacgtaacctgggaacaaacacagtgatgctgatgcacttgcctctgcagggctcgctgccaccgaggccatgcaggccagtccccacaaggacgaagatcaaagacatgggacagtgatggtaaccggggcctgtggtgctaccaccacctgctcacgcctggtagccagagcaactagaccctggtttctgaaggacaggggtgtttctagaacagaagaactggataacttttcctccagaatgtgtgagaaaaagcacttgctccatcctgtgccaacctttccccttgccgtgccttctcccctcagtgggtagtacttcaaggctgcaagtgtgtgtgtactccatgtaaggctgcacagtttgagggactagattacaccaggacttttggacaaactattgctgcctagttgtacacagatttatttgctccattagaggcccagcagcagttttctagggaaatgctgtcaggagctagggtggaacactgagcagcatggccctgccctcagcagcttctgggattccccccagtattagctttgagttcaggaagtttattgcaaagaagcaacaaggtgcagcagagaatacacagagttcagacgaggcaaatatccccatgtggtagcatcaaaaacaacaagtgcatatacccactaacccacg

SEQ ID NO: 610 - DNA, 4042 bp, Homo sapiens
aaggagtaagctggtttttgggctgtgcagagccacgtcctactaactgtgctttaacatcccctgcagagctaagtcttagccaccaaggacaagaccaagcaagggggggtgggggagtggggaagtggcctatttaagacgaacctatcgatacccagagttcactggttcagttacttgctttcactagtttttagctttttaataaataagtagcaatgttctgggatgactcctggcagctgcgaaccctcattttagcaatagtctgcacagctccttcagcctgttggtctggctgaaatgcctctctccccactccggcttttgtctggcttgggccctcctggtcatcttgtcctaggcagcctgtggaggtctatgaaagccacacctccagccagctgatgctgcgcccgagtcacatggcaggcgccacaggcaaccccggtgctcacagggcatcagggagcacagcagcatctgccatggaggcggcttataagttagtgacatacagttatctcacttggtggcagtcacctttaggctaaagcatccaaatcccaggaagaaaatactcacgttagttgatggatgttggaaggcattggaggaaaacaccacagttaggactgttaatgacttacacactgttggtgagactcatctcgaacatgcgcaaacattgatcgtagtaacggtggtggtggttagtgccacattcaaataaaaatagttctatacaatatgttcatttggtcatgtgctatttacagattttacaaaacacacacatacacacacatacacacttgcccttatgttctctataccaggccagcagaaacttgcataaaatgtacatcacagatgacaattagtgcctgtacattaagaatacaattcctatgactacctacacagcagagcaggagccttcttcccctcaagcagagtacaactaaagttctgagctaagaactggagagaaagttggacatgtctgttagtcccaggtaagccacttacgagttaaagacaagacagttatttttctctgtccatttaaaatgttttatttttttaaaactagatgacgtgccactgaaataggcaatgttggcaaaacaatgtctgttacaataaaatacattagacatttaaataaataaccttaaaaactatgtgaagggacataaacccagtcgattgaatctggaacaatgttttctgcacaagcgagtacaggcatacctctcgttaaaactgatgtaaacagaacgaaccatcacaatcctaaagaagaagccaagcggggcgggggtaaggtggggagaggtggggtggggtggggtgaacggaggccaaagtgggtgagggaagtagcaaaccaaaacaatactgactgaggtagcaagactctgctcagtgcagaaaaattggcttatgaataaaaattagactgtgatatcaaattaaatccggatcatcatgcaaaagacacaatacatgctatttagttttagaaaaaaaaccacacacattcatttcctaaaatctgctgccaattaatttgctgacaatgtctgctggctcaactattttttttatacaaggatgagtattaaacagaacactgtacatgctttttcatctacaaaaaaatatttgcataaaatagtgttagttctctgtacatgtcaatggacactttaattatgtgtataaaaaaggaaaatcttgccccactggagtcagaaaaagcaaaacaaaatctagagtatgaaacctccatcaccagccagtatgttcatgtgaaaattcagcagaaatagacagttgctttaaacaataaaaaaattaattgattaagttaaacatcttctttatggaaaactgtcagtcaagaccagaacatatcgctaaagttagtgtctgtgctatagacccagatcaccaggggcattatgagcagcacaaacggccaggaaatcccatcggtgcatgccgagaacgagcaggatttggtggcaggctgcacacactctttaccaggttccaggtagttgcgggccacaaacttgagcgtctcatccatgagaatcacgggcaaggagattttcagcaccatcagccactgggtcacgttcagcggtgtgatctggaagatgagctgacacacagggaagacgtgtcacgcctccagcctcccctggaaggaggtggctggtcccaagccccacccaaccacttactggcaagggttcgacatagaggatcaggaagtggagtgacatggacaggcagatggagcccacgagccagatgttctcccaggggggcatcctcagcaaggactggttttcggacaagctgcagagcaaggagaggtggggaaacgcacccccaaggcaaggcacgtgtcacagtggcagtaagaccctgttggactacacttcagtaaggcggctgttaatgtggcaccatccgctgacctacctccactttctacagtggcaaagttgaagagaatgtcctaatgcaggacaaactgtgaattctgtatctatgttttggcatagcagaccccatcttagtgggttcaaagctgttcccaattgccctggagacttgggctatttagaaatttccatttttgtcacgggcttaactggatggtaccatttgtctgtgtgaaagggtgaggttccttccctgtgggtgctggcatacaggggtaccaaagttcctatttttggcccccacggtttcttttaaggaagagctcctaagaaacacagggctaagcactcccactacttcctggaggtgacgacagctcatgcttttaaaactggtattgcctgttctcctttcttttgggaagggaagaactgtcctgtgatcctcaatcaaccgtgactacacacaattccccggtgccctggcagtcaccatgctcgcctcagcctgccgtgaaggtgcactaacctgttgagggcgttacacatttctatagttactagaacagagagcgccattgtcatcgggtatggggattcaaagattgcacaatccacgccttcaaagtccgggttgtcctctttacactgtaggaaatgactctgcaagaaaatccaatcaaattcctatcagcccagtatatttcccaagtccaggctccaaccccataccaagcctagcacagaccagcctgaatgcagagccagccaagaggtttaccccaatttctcggagaagccctggtccttcagaatcatcttagatgtaactgtttattgtctgagtcttaagatgatttgatagataccgaaaccacagaaaggtcaaggcctcacaacacttctcatgtaaggtacagaaagaaaggtgactgagtaccagctggtagaaggacactcttggaccaccgtcagcagcaatgaaccaccatgcagcagcacccacggtagcagcgccgacgtaacctgggaacaaacacagtgatgctgatgcacttgcctctgcagggctcgctgccaccgaggccatgcaggccagtccccacaaggacgaagatcaaagacatgggacagtgatggtaaccggggcctgtggtgctaccaccacctgctcacgcctggtagccagagcaactagaccctggtttctgaaggacaggggtgtttctagaacagaagaactggataacttttcctccagaatgtgtgagaaaaagcacttgctccatcctgtgccaacctttccccttgccgtgccttctcccctcagtgggtagtacttcaaggctgcaagtgtgtgtgtactccatgtaaggctgcacagtttgagggactagattacaccaggacttttggacaaactattgctgcctagttgtacacagatttatttgctccattagaggcccagcagcagttttctagggaaatgctgtcaggagctagggtggaacactgagcagcatggccctgccctcagcagcttctgggattccccccagtattagctttga

SEQ ID NO: 611 - DNA, 25870 bp, Homo sapiens
ctgaaagctccgagagtaattctcatgtgcatttaggtttgggaatagatcactgttaattcaacagagaaatgaaagaagagaaggttcggtggggtccagccatgccctgttacgtggaattttttccctaagggtgtggtcccctcccctacagctcgtcttttggagggctggtccaggctcctctaagccatgacgccggctgaggatcagcggttggtgtacatgatctcctcagccttgcccattgtcccttgcaagacatttcttggatgggagtttccagtgctgggagaagttccgccccactgactctattctgctgtgtctcctcagagcctgtcatagggaactgcatggatagaagttctccaggacaagcagtggagctgccggatcacaatgggctcgggtacccagcacgcccctccgtccatgagcaccacaggccccgggccctccagagacaccacacgatccagaacagcgacgatgcttatgtatgttggtcccacctgctgcacagaggtggatcctcccagtcccagccttgaaacagagtatagtgatgtggggtagcctctcttggccgctctcctcagtcagcattcagcctttctggaaacggtggggagcatttctttttttttcttttttgagatggagtctcactctgtcgcccaggcgggaggacagtggcgcgatatcagctcactgcaacttctacctccccagttcaagtgacttttgtgcctcagcttcctgagtagctgggactacaggtgcctgccaccacacctggctaatttttgtatttttagtaggcatggggttttaccatgttggctaggctggtctcgaattcctgagctcaggcaattcgcctaccttaagagcattttctttgagtcaccctaacagaccaaaccttaattcaagtagaatctatgctccaaattttagaccaaagaatcagaaatagttgccatctgttccctgtagttttggttattaaacctcttctcagtctaaactcaggccccagcaaatgagcccataggcttctggttatttttcagcagctacattgagcttactcagatcaggggagctggtgggcctcagcaaagttttgttttcctagggtggtgctagtctagtagctagccacatgtggctattcaaatctaaaccaattaaaattaaaaacaatttaaaattcagttcctcagtcacaccagttacactttattttttattattattattttttgagacagagtcttgctctgtcacccaggttggagtgcagtggcgcaatctcggctcactgcaagctccgcctcccgggttcacgccattctcctgcctcaacctcccgagtagctgggactacaggcgcccgccacccttttttgtatttttagtagagctaaatttttttagcccagctaatttttcgtatttttagtagagacggggtttcaccgtgttagccaggatggtctcgatctcctgacctcatgatccaccagcctcagcctcccaaagtgctgggattacaggcatgagccaccgtgcccagcccagtcacactttaagtgctcagtagccacttgtggctactggttaccatattggacaggacagagaacatttccatcactgcagagtgtgactggacggtgctgtcctaagacaaagtcccagtggagatggggataggtcagaaacctggttttagaaggccatgtaggtatcaagatgtcaccaccagctgagatttgccacatccgccccaccctcagcccccccactgggcagagccaagcagcttcccacactgtcgctgtggagcaccccctttgggtggtgctttagaggaaggagtctggagtggggccccgggctgtcttttgcctgggctccttcagaaggaccagctgtctctaggggttgcctgagagtggtgtcttgtgtgcttatttcttctcttaactgttttctgcaggtacagctggataacttgccaggaatgagtctcgtggctgggaaagcacttagctctgcccggatgtcggatgcagttctcagtcagtcttcgctcatgggcagccagcagtttcaggatggggaaaatgagggtgaggagccttatgcatggggcactccagagaagttcctggaggggcctccctccatcttccgtaactgctcctctcttcgtaggaagagctcatggggaggtagagccacagcatcccacaggttctggacacagcccctttccccactggtcttccctgagtgtgggtgtgtaaaggaggtgtggcttctggccagatggcacagggctctcccattcctgtctctcatctctgtgatgatatgccttcaatcactttttccagttctgcttagagggcatcaggtcctaatggcacatttctacctcttcttggagccagtcaagggagggtgtcataacaaataataggcgtaggccttgggcggggcaggtctgccaccagtcccaaggctgtccttttcaggctctgcaggtgaggcacttggctttctggaccccgagatcctcatctgtaaagtggcaaaaacgatagagcctttatcctacattgtgccctgagggctggctggcttagtgagtatcaagtgcttagcacagtgtctggaagacagacagtgcccaggaatgggtgcctgcaggcagtaaaattattctccctttcactctttaagaggtgatcctttctgaaggagtcctctatcttctctcacactacagtagttgatcttacctaaggatgggaaagggtaaaggaaaagggaaaaaagcagaacaggtagaggagaatataggaagaatcttggcccccgcccatcgtcactcaacaccttgagggcctgctgtgagctagaattcagggctgggagtcaggctgtgggatgctcgacaggttgccttcaattcctcctctctctcccccttgctctcctagtcccccagttccctgccaacctcatacgttctttttggtcttgcagaatgtggggcaagcctgggaggtcatgagcacccagacctgagtgatggcagccagcatttaaactcctcttgctatccatctacgtgtattacagacattctgctcagctacaagcaccccgaagtctccttcagcatggagcaggcaggcgtgtaacaagaaacagagagtgagtgtcaccctggccagagccaaaccagccctgtggcccagtgcctgctcccaatcccatcaggagcttcagcccatgtgttgtggtggccagtgcagtcgacagtaccacgcctcccctcgtggccttcacagtttcttgcttttcattaacgacgctgctagttttagggcgcgaggtaggggtgggggtgtgcagaagaaatgctaaacacagtctcttggttcggttatgggaataagacacaagactcgccgtgtgttacaggtgctctagccttcatagcgacagaagtgagctacggctccagaggatgcaggtgacctccggtcagcataatgaggaaaggaggaagtccttaaactcagtcctaaaagacaaaacctggcaggaaaatatgtccagccatattttttaaggccatacagaagcaagtggcaggatattccagattagggaaatgtgtgatgagaggcccatggtagaaagaatggggaaattggcttgtttggctggagtaatgcaaagagtacacagcaggcaccattggttgtatctggaaaatccttgacagaagaggcctgatgaaagggaagccacttggcaaatccacatcagagcctcagtatggcaagctacctgaacacctgagggaaagtaaacccgttgcattttttaaaaggttttaaatggaatatttgagcctttctcttttcaaactaattctcctctgtgtctgctttattccaggttttgtgtacagcttgggaatgaaaaggttgattgtaaacccacagtatctagcagcgttgtgccaaattgcccttgtgtttctctccacccaaaatatcacagctgctttcctcacatttggttcatccgtgtgctgttcttttgggttctgagagggttttgccatgtttgcttgtatgaccaagtcaccaaggaaataaacaggaaggaaatccatgttctccatcttttgtgaaagtatatttgagttggtggttttttgttttgtttgggggtttgtgttttgttttgtttttggtatgttttcttccagaggtgatatactttcttttttttcttcctttcttttttttctttcgttccttttttgaaacaggagagcaaagcagttagagttcagaggccagcggcctcagggccactccctccctagccttcatcagcagagcaccctccatccccctgcattgctcttctgtgaaagcaaatactaaaggatgccatcctctggaatcctaatggcaggcaaagggagagaggaagggtgacggcttctggcacttagaaaacaaaaagaacaaaaaaagagaaacccccaagcctggaacgcagagaggtctttactgctgggatccacggaaaacatgtctgtcctagccaagatcatatgaagagtttggcacggaggctgagaatgacctggcatagatggtttgccagttaggatgtctcaatttgagcctttgcttttggtggataactcagctcccctcttgtaacctggaaagttggttgcctttatcatcctgctggttttatccatggactgaacacccaacagcagtgcactatgctttctatggcatctttcattctcattttatattgtgctataaaaaggattgtttctccatatatatattatatatgtgtgtatatatataatataatatatgtgtatatatatattatatatataatatataatataatatattatatatatattatatatataatatatatataaaatatatatatatatgctctcctctttcagcctctttgtcacagggaagaagtgtaggaggttgccttgggccctgcctctctcctaacctcctcttccccactgggtaccctcagcccctatattttaattcttgatcatgtagaaattgtttttggtaaatgttgatattattgttattatcattattaataaataaagagaaaaggaatttttgtttaaatgagaaatgtttaaccagattctgttctatttgaattgtgacttgcaccttttgttcaaagtatttcctttaggcattgtaattgtgaacagctcttacttgtgccagtgacagatgcagtggtctcctttccccagttgaagcagtgcatacgcagtagctattatttgtgttatctttatttctcttcattgttagaaaccaaagtcttctctgctggctggggctgagagagggtctgggttatctccttctgatcttcaaaacaagagagagaccttgaatacactgactcttccaccctttttttttctgggaaaggagagcaagaggtcccgagtcccctcctagtctttcatcctgaatttgcacagaggaaagcgggtgcccggcatggccatcctgatgttgctggcgggatccccatgcaccttgtccttctccactgatactggcagctcggctcctggacccaagatcccttgagtggaattctgcagtgcaagagcccttcgtgggagctgtcccatgtttccatggtccccagtctcccctccacttggtggggtcaccaactactcaccagaagggggcttaccaagaaagccctaaaaagctgttgacttatctgcgcttgttccaactcttatgcccccaacctgccctaccaccaccacgcgctcagcctgatgtgtttacatggtactgtatgtatgggagagcagactgcaccctccagcaacaacagatgaaagccagtgagcctactaaccgtgccatcttgcaaactacactttaaaaaaaactcattgctttgtattgtagtaaccaatatgtgcagtatacgttgaatgtatatgaacatactttcctatttctgttctttgaaaatgtcagaaatatttttttctttctcattttatgttgaactaaaaaggattaaaaaaaaaatctccagactcaagttgctaagaccttttgtcctgccttttgtccttccttttgtgaggcacttacttacaacttggttacttagttggacagcaggaagttgtgtagataggagcctgattgtgttcttaggctgatagattatttgcctgtggtttggagtctagttggaagaagcctcaggtaggtgggagctggagcagtggaggctggagaggtctcccaggctaagggtggggctttgagtgacttaagaaactcgcattctctagaagcctgaactctgcttcacactgtgtccctgggcacccagctcggactctgccctgtcagaagggagcatttgaatttgctgggccaggtggaaaacagcttccttgaaagggcacttttgaagagtacagggaaggatccttaaagagtggacacaggctggacccttcatgacgtgacccccattggccgagtgaaaggatagccaaataagtatttggaaagaaagggaggggcctggcatggctcacgcctgtaaatccagcacttctggaggccgatgggggtggatcatctgaggtcaggagtttgagaccagcctggccaatgtggcaaaaccccgtgtctactaaaaatacaaaaattagccaggtgtggtggcaggtgcctgtagtccctgctactcaggaggctgagacaggagaatggcttgaacccaggaggcagaggttactgcagcaagccaagattgcaccactgcactctagcctgggtgacagcgggatactacatctcaaaaaaaaaaaaaaagcggagcgggggtggaattttcctatagttttctcctttatcccacacctgaactccaaagggcagggtagagtttccagcaagtttccaggcatggctaagagacaggtggttgaaggtcttctatgaagaaagcttactgaagctggaaagaccatctgagttcacagaaggaagaatgagaggagggaatttagaaagccttccaagctgggcatggtggcgtgcgcctgtaatcccagctgctcaggaggctgaggcaggagaattaggtaaacccaggagttggagtccaacctgggcaacatagcaagacccccacctctacaaaaaataaccaggcttggtggcacatgcctgtagtcccagctgctcaggaggctgaggctgaaggatcatgtgagcctaggagtttgaggctgcagtgagctgtgatcgcaccactgcactcctgcaaagagaaaagaaagatttcaagtccatgagggcggctagaaagttgctgtagggccatttagattagagaagaaaagagccttctcaagaagggccttctggccgggcgcggtggctcacgcctgtaatcccagcactttgggaggccgaggcgggtggatcacgaggtcaggagatcgagaccatcccggctaaaacggtgaaaccccgtctctactaaaaatacaaaaaattagccgggcgtagtggcgggcgcctgtagtcccagctacttgggaggctgaggcaggagaatggcgtgaacccgggaggcggagcttgcagtgagccgagatcccgccactgcactccagcctgggcgacagagcgagactccgtctcaaaaaaaaaaaaaaaaaaaagaagggccttctaaaactcctctgagtctgtatacgctgtcatgcaagactaggtgagtctctagaatcaaacagtgataatacccagatgccttccagcaaattgtagcacctgttgcaataggtgccactccctcctaaaatcagccagggtgcctttggaccagaggtagggtgagcttttgtaggaagcagggcactggctcctggatacagactggagagcttagctccagaaaacaggagccatgttgacagaaaaccgtgctctacacagttttctttctgactttgtgccagcccccaccccaccccaactgcaaagatcaagaactcagagggctactgtgcttccctcctgctgatcaaagatgagctctgtcctggccttagtcttttccaagcaggagggcaggagagaatcttgcatagctggctacggtgccccacccaagggtctaacttggggctctatcacaaaagctgcagcaaaattgccaaaagtaggaactactgggggtgggggtcctgtctcccctgctcagtcaccacctcccctccctaactctcattctggctcataccacgtgctcccagaagaaacgttctgagcaggggctggtatgagactgcctcccctcccaggacccactcctccctatgaccaggctggtgaccctccctctagggtgccagtgccattcactgagcagatgtttggcaggtgtctgttatgtgccagacctagcaggggacagagtcctcccgatacagatggaccagtatgtttggacataaattgtgaaaggagttgctaatctttctgtgcaaaatccactcttgcggtcaccgccaacactcctacacatgtcagggcatccagggccaggacttggtaaccctgttcaggagcagtcgctctggagactcccaagacgagggaaagaaatgggtggaaacaggggcctacactgtgggccccgcagccaccaaacagtccaacccgtggccactgagtgccttgaacaatgcctggctggaccctgagtctgagtgtgtcatcaacccagtttgttattgtcgttgttgttgttatgtatttttccatcagctctgtccagaaagacctccttcctttccaaaatattagtaaagggggcttagactagtttaagccaaataccttgcaataaaatggagtagccaccctggtgaataagtatatttagaaaaggaaactgcctgcttggtaagatgctgttcaacagcaccccctatcctgatgcctcgcagtccctgagccaggaaactgagaagtccctgatcagactgcaaaggctgcaggctccgcaagggtgcaaggccaccctcaaagaactagaagccaggcctcccgattcccacccctgccagcgctaaatagtaaccgctgaaggatgcagggcagctgtgagctgcagttttcccacaggcaaaaatcacaagggtaaaatctggcctccagccttatagggatattctaagttgtgaaagtgctttggccacaaagaactgcgcaaatgttaaatactaggtttagccataacaatcattttagtaacaaaccaaagagaagggtgaaacactggcaagtatcttggagtccaaccagtaagcttctgagattcccccatgtgctgactgggacaaactctaccccccaaaagaaaagacgctctcttggcccgagacacctgtgagctgtcccagcaggggaccagccaccttcccactttctaaagctacagacagctgggatggtcaagtaggcagcccaggctgatggctcaccaaggccacctccctgtctacacagtcccatagacatctggggccacttcagtcctagaaaagatgttccatatctcagcaactgcaagtcaaggacaagcagagagatgtgggactgctgccttcatgcctgctgcagaagctgaggtctcagatctgataaagcaagtgtagtgggaataagggaatacattaccagaaactgggattctagaaaacagaatagttactgtttactaagtgctaggtacctttctaacagttttgcatatatgttcaaagttcatgcttaaaacgatacaaatttattatcttacagttatggaggacagaagtccaaaatgggtcatactgggctaaaatcatggtggcagcagagctgtgctcctggaggctgcagggaaaaatcctttgccttctccagcttctagggaagggttgctcatgtccctcagctcatggcccccttccagcagtcacgagtctgatctccactgccatcctcacatctctttctctgactctgaggccactgcctccctcttgtataattaaggacccctgtgatgacaatgggcccacctggagaatccaggccaaccaccccatctccaggtccttaatcacactagcaaaatctttttttgccatggaaggtagcaaagccacaggttccagggatgaggctgtggacatctttggggagcgttattctgcttgccacacagtaacccctgccataactcagggcgatggcatattctatcattatcttcaatcagaaactgatgtgtggggaggtgatgtatcataactcatccagggtcaggcagctggatttgaacctgcctgacccttagatttgaggttttctggctccagaatcttctctgaagtgaaaggcatgaggccgaccactccctgatctggtaaacagagatgtcagcctggtttctagtgttagggagtttcctggagtgatggtacagggtacatttctgccctgcatcccaagtccagagactgggttctaggtccagcctttcttctaactccctgagagatgacagcctctgggcaaagtccctctgtgctcttcagtctcttcatctgtgagatggtggcatggggagaggctggagtgatgtcacagttcctctcagcctgcatcacaggctctaggactcaggtcctatcagtaacctgctgggggaggtctgggccttccaggagaaacctgacaagatggtgctgcaaacaccaacggacacacagcactttacattcacaggctgtctcaggggcctccaacaaccctgaccattcttgccccattttgcagatagaaaaccgaggctcagagagattatataacttgcccacgatcttcctccagcaagatggaggccaagtgaaatgagaaagcaggtctcctgccacttcctttgcccagaggtcttctccccacaccagggcttcccaagggctgagatccagtcacacctgtgcgtgatcaaatataagtgtgaacaatgcaaagggagacgtcttcaatctaaggggcttcaattctgtaatgtaattctgagattatgcccttttttgttaaagcctttcctttttgaagtgatggtcactgtagatggtgagggttttttggaggcggacaatatctttacatgacaaaattaaaagttggcagctccgaattgatctctggagtgttttgaaatgcaagaggtctccgaaacctcagtctgggagccacggagggctctcccctctccccaggtttaccagtttgggaggcttggagagaggcctggaggacctgctggggactaaagaagagcactggtgggaggacagggcgggggaagggggaggggagtgaagtagtctccctggaatgctggtggtgggggaggcagtctccttggtggaggagtcccagcgtccctcccctcccctcctctgccaacacaatggacaatggcaactgcccacacactcccatggaggggaaggggatgagtgcagggaaccccgaccccacccgggagacctgcaagcctgcagacactcccctcccgcccccactgaacccttgacccctgccctgcagcccccgcagcttgctgtttgcccactctatttgcccagccccagggacagagctgatccttgaactcttaagttccacattgccaggaccagtgagcagcaacagggccggggctgggcttatcagcctcccagcccagaccctggctgcagacataaataggccctgcaagagctggctgcttagagactgcgagaaggaggtgcgtcctgctgcctgccccggtcactctggctccccagctcaaggttcaggccttgccccaggccgggcctctgggtacctgaggtcttctcccgctctgtgcccttctcctcacctggctgcaatgagtgggggagcacggggcttctgcatgctgaaggcaccccactcagccaggcccttcttctcctccaggtcccccacggcccttcaggatgaaagctgcggtgctgaccttggccgtgctcttcctgacgggtaggtgtcccctaacctagggagccaaccatcggggggctttctccctaaatccccgtggcccaccctcctgggcagaggcagcaggtttctcactggccccctctcccccacctccaagcttggcctttcggctcagatctcagcccacagctggcctgatctgggtctcccctcccaccctcagggagccaggctcggcatttctggcagcaagatgaacccccccagagcccctgggatcgagtgaaggacctggccactgtgtacgtggatgtgctcaaagacagcggcagagactatgtgtcccagtttgaaggctccgccttgggaaaacagctaaagtaaggacccagcctggggttgagggcaggggtagggggcagaggcctgtgggatgatgttgaagccagactggccgagtcctcacctaatatctgatgagctgggccccacagatggtctggatggagaaactggaatgggatctccaggcagggtcacagcccatgtcccctgcaaaggacagaccagggctgcccgatgcgtgatcacagagccacattgtgcctgcaagtgtagcaagcccctttcccttcttcaccacctcctctgctcctgcccagcaagactgtgggctgtcttcggagaggagaatgcgctggaggcatagaagcgaggtccttcaagggcccactttggagaccaacgtaactgggcactagtcccagctctgtctcctttttagctcctctctgtgcctcggtccagctgcacaacggggcatggcctggcggggcaggggtgttggttgagagtgtactggaaatgctaggccactgcacctccgcggacaggtgtcacccagggctcacccctgataggctggggcgctgggaggccagccctcaacccttctgtctcaccctccagcctaaagctccttgacaactgggacagcgtgacctccaccttcagcaagctgcgcgaacagctcggccctgtgacccaggagttctgggataacctggaaaaggagacagagggcctgaggcaggagatgagcaaggatctggaggaggtgaaggccaaggtgcagccctacctggacgacttccagaagaagtggcaggaggagatggagctctaccgccagaaggtggagccgctgcgcgcagagctccaagagggcgcgcgccagaagctgcacgagctgcaagagaagctgagcccactgggcgaggagatgcgcgaccgcgcgcgcgcccatgtggacgcgctgcgcacgcatctggccccctacagcgacgagctgcgccagcgcttggccgcgcgccttgaggctctcaaggagaacggcggcgccagactggccgagtaccacgccaaggccaccgagcatctgagcacgctcagcgagaaggccaagcccgcgctcgaggacctccgccaaggcctgctgcccgtgctggagagcttcaaggtcagcttcctgagcgctctcgaggagtacactaagaagctcaacacccagtgaggcgcccgccgccgccccccttcccggtgctcagaataaacgtttccaaagtgggaagcagcttctttcttttgggagaatagaggggggtgcggggacatccgggggagcccgggtggggcctttggccctggagcagggacttcctgccggatctcaacaactccgtgcccagactggacgtcttagggccaagatcgacgttggaggacctgctggacgcctggctgcttacgagtgagggagtagagtctgccttagcaaggctcaagtagaaaggaagtcacagcggaccaggcaaagccacagacaatccaaggccaggtgccctgaaaggggctcaaacaaggcctgcagccctgtctgaggcgggccaggaaacagggttgctttagctgggagcagtgggttccccgtccccagaggtgtgtccgtatagagccttctccagcccagccgctgtcagcggggcgggacggagcggggcggcctcagggagccagccactgggattggggtttggtcccgggtgcaagtgaagcgcttggagtttgcgcctgtcctcctttactaattcaaaaacctctcaaacagacacttcccttttcttctcacaaggccagtatccccctcccactactcccatcccgcccagaaacagccgcggcttcctcaggcacagcagtggaagccagtcctccaccccctgcggctccatgccatgccaccccctctttctgccagccctggcagaagctggcctgagtaagaaaattcaccaccacctcttgcaggtacatttttatttccaagatgctctcatatctgtgctctcactgcatcctcccttccccacatcctggctagattgccatcagacgcagagcatggatgaggacactgaagcctggacctgtgacgtcgcttgcccagtgaacagcaggatgggctaggccgcgctttttagaccctgcacccctggccatccatgattattgaaaagagtgcgcgggtcgggtgcggtggctcaagcctgtaatcccagcactttgggaggctgaggtgggcgtatcacttcaggccaggagtttgagaccagcctggccaatatggtgaaaccctgtctctactaaaaatacaaaaaaaatcagctgggcatggtggcttgcacccgtaatcccagctactaggaaggctgaggcaggagaatcgcttgaacctgggaggcagaggtcacagtgagccgaaatcatgccactgcactccagcctgggcgacggagcaagactccagctaaaaaaaaaaaaaaaaaaaaaagagtgtgtggcctggcactcaagttcacatgggtgtgcaggcatgcctgtgtattctcacatgacctccctgctcacggtccctccttgcactcatgtctgaatgtccccgcgtgcacgcacatggcttcacagatctgggcagtgccttccctaccctctctctgcagggccttttgccccctcatgcaggcccctggataatcggccccatccccatgtccccatctccagtgtatcttagctaccctaggtaaaggagtgggctttttagttcctaaccttccagagctacaacagcagtcatccagccaggtctgggtgggaacattttctagatacgggtgctgagatctctcagcccagagagaagccctggggaattttcagagagaaagcagtctccaggtggggctggatgtactgatgccactgagatctgtaaaggagtccctaacacctgacataggagtgacaaaactgttttctgcaccaactgagcagaatacacgcagctgacctgggctcaaggtctggccctgccacgtgctggctctgtgatgctggccaagtgccttcgcctctccgggccacagttttttgatctgaagagtggagccctactcaagccatctgcagctctcgggctctctgacctgacatctttcgggtggtggggacacaaaggaagcagcctctattgggagaccttgtgcttctttttggtcccaggacactgccccccaccactccagtccgggtcccaagggcccagtcagctcaactgtaatcatgacaacattgatcaagcatctttacgtgcaggtgctgtgccaaacggttcgaacgctctctcatttcaatctcacggcaaacctacggtggagggggtacggttgtatccactttacatgtaagaaactgaggctgatatcaagtggtggagccaagaatagtgcctcgttgcatcttactccaacctctagcccatccggcctcctcccttcacgtgcgcctaagagggctagggggcctggataggggaggtcagctccacagttttgagtaaacacacacagtctcaactctgatgacaacttaagtgccaggcatagtggctggcatggggcacacactcaagtcatgttgtgcagcacctaacagtttatcaaagtatcagcaaacttattgtcctgtttgaccttccgcacaaagctgtcaaggaaggcagggtacggagggtgattcctaccttagagatgaagaaactgaggcccagagactgcccagctaccagaaggtggatagagcgctggcctccatgcctgcctgacctggagtctgtccagtgcccacccacagaacagcctcggccctttcccatgcccagacacagatggcacacttgcgacggcccactcatagcagcttcttgtccagctttattgggaggccagcatgcctggaggggggccaggcatgaggtggggtaggagagcactgagaatactgtcccttttaagcaacctacaggggcagccctggagattgcaggacccaaggagctcgcaggatggataggcaggtggacttggggtattgaggtctcaggcagccacggctgaagttggtctgacctcagggtccaaatcccagaactcagagaacttgtccttaacggtgctccagtagtctttcagggaactgaagccatcggtcacccagcccctaaatcagtcaggggaagcaacagagcagggcatgagaactcctctgtaggcaaccatgggacccacacccatgtccccactggacgacaccagtcaggaccacaccaccctctcaacttcactggacgacagccctgagacctcaggcaggaatcccccacagctgccaccctgggagaagagatatccttgcaggaaccccagcacaagtcaaaccctgccatctccaggtcacctcagatgtttatgcccctgggcctgaggcacaaagtgacagggtggggagatgtgaaaggtcaaggctgtcattgttttctgtgcaaacagcaccgcctggagttgcacaacctggtggctctgagcagggtaggacagagggaggcagcctctcatttggaaagtcattggaggattgattagttgtgtgatctggggcaggtcacctaatcgctctgagcctcaattttctcatctgcaaagtgagaaaataacacctaccccaaagccggttctggggactaagaatgtttatgaacacctctgctatgccagctaatgccagtcagggtgaggtggagaagggagtaggggagaggagagtactgatgggcaggggcaggatgggagaggaaggacacacttctgctcacactggccccaggtcttagaacaaagcagaagcactcacgggcttgaattgggtcaggtggggcctcccaaggcaaacccctagcccaggggtccccaacccccaagtcatagataggtactggtccatggactgttaggagccgggctgcacagcacgaagtgagtggtgggtgagtgagcaataccgcctgagctccgcctcctgtcagatcaagtggccttacattctcataggagtgtgaaccctattgtgaactgcacatgccagggatctaggtggagggctccttatgagaatctaatgcctgatgatctgaggtggaacagcttcatcccaaaaccatccccgctggcccatggaaaaattgtccaccacaaaactggtccctggtgccaaaaaggctgaggaccactgctctagccagaccttcagaaaaggaaaatggggccaggcgcagtggctcatgcctgtaatcccagcactttgggaggccgaggcaggaggatcccctgaggtcaggaattcaagaccaacctggccaacatggtgaaaccccatctctgctaaaaatacaaaaattagctgggtgtggtggcgcgtgcctgtaatcccagctacttgggaggctgaggcaggagaatgggttgaacccgggagacggaggttgcagtgagccgagatggcaccactgcactccagcctaggtgacagagggagactccattaaaaaaaaaagaagaagaaagaaagagagaaaggaagagagggaaagaaagaaaaaggaaagaaagaaagaaagagaaagaaaggaaagaaagaaagaaaggaaagaaagaaaggaaagaaagaaaggaaagaaagaaagaaagaaagaaagaaagaaagaaagaaagaaagaaagaaagaaagaaagaaagaaatagaaagagaaagaaagggaaaggaaaggaaaatggaaatgagggctaaaacggcacgccctaggactgctccggggagaaaggagggacctgggaggaatgcagtctcaactctgtcatctctcccgcagcagcctgacaaaggccctgtgaggaaagaggaggctgaagaggcacaggcccaggggaggctggagcacctccattccattgttgggatctcaccagggcaggggcgggtgggaatggaggcagctggcaggggggatggggagggaggccagcgggtgtacctggcctgctgggccacctgggactcctgcacgctgctcagtgcatccttggcggtcttggtggcgtgcttcatgtaaccctgcatgaagctgagaagggaggcatcctcggcctctgaagctcctgaggaaagagcagggctgagtggggtggatcggcctctggacgagccctgggctcctgcttgaccacccattgggactgggatccccaagttgcctccaccctgcccccagcccagtcccaccaagtgcttacgggcagaggccaggagcgccaggagggcaacaacaaggagtacccggggctgcatggcacctctgttcctgcaaggaagtgtcctgtgaggggcaccccaggtccccatgcctctggacccctccctggggaggtggcgtggcccctaaggtagaaccttagctgggtctgccagaaggagtaggggccggctccctgctaatacgggctctcagaagggggactggtgaggggcgagggatcgaggcccaaagggaggtgggtgggatggagcagaaaacccaccagactgaacatcaaggcacctgcggtctggactgatctccgtccagtccagccaacatgctgtgtgtctttgggtgatttctggccctctccaggcctcagtttccctgtctggggtaggactgggctgtctaaggcttcctccagccctaagcctgaagaatgaggggggaacctgcacttggagccacttccagccccaccccctgtgtagctttgggcaagtgacacccctcccgggcctccatgttcttcaggttatgatgaggggtggggggcacccgtccagctccgaggcttccttagctctagcaagtgcttctccaggcttgctggctgggctgggcagggagctcctcttgcccctcttcatcctcctcccctcctctttcccctccccagagggcattacctggagcagctgcctctagggatgaactgagcagacaggcaggagggttctgacctgttttatatcatctccagggcagcaggcactgaggacccagggcgctgggcaaaggtcacctgctgaccagtggagatgagggcctgaggcagggtgtccagatgcagcaagcgggcgggagagttgggaaatccctaggagactgagtccacgctgctgtcccgccagccctgcagcccagatgagctcaggaactgggggtgggcctggggagccctcattccttcctagctgactggctccccagggagaggctggtgagaggggaaatggcttggacataggccaggggcctcgggcccatctcagcctttcacactggaatttcaggcccctccctccaccagccccaagccctgaacacagcctggagtagaggggtgaggggcttcttcagacttgagaacaagtgggtggcttgggctggggggtgtttggagtaaaggcacagaagaccaggcatcagtggctccggcaaggcctggttacagggctgagctctcacagcccctcccagcacctccatctctgggtttcaatccaggcaggcgagtgctgctcacccagcagccccccacccgcccccaccctgtgtgccccccgctgcctcccccttagtgtagggcaggggttggtggagaagggccaaggccgctcagagcccgaggcctttgcccctccctccaccaggctccctattttgccctctggacccactgataacatcccctgggggaggagctggtctcatgtctggggccctccccagcccccaccaggactgattctctcgttcaccttcctgggttcctcagtggggctgggggaagagcagccctcactgccccctggctgtgggagcaactgggaggaacaaggtctggtgaggagagggcacagaggagttctgcggggagtcggtggtccaggaggggccgctgacccttctcggggctgagatgtcccctgggcccacagtgaagccgcagcagggatggcaggatgagggcgcctgtcttccagatgctgacaccttggagccaggacatcttaggcttaaatgatgcctttggcacgtaataggacccaggtcacagagataacatctcagagcctcaattttctgaggataaaatggggctggaatactgattgcccagagtggtgctgaaaaggaaatgagatagagaagtacaaagcagcgggtccatggagggactcacacctccctctccctcctaacgctgtgcccttcccagacagcagagtctgcaggcagaaggagcctctaacataaaaaatagagctctggcagcaagctgtcctctcagaagtaactaacaccacagtatgaaatcagaggcctgagaaagtggcccggctctgccctcagaattctttatcggtgggtgagacttggaattcctctattagcgatccattcctggctgggcacagtggctcatgcctgtaatcccagcactttgggaggctgggacggacggatatctgaggccaggagttcgagaccagcctgggcaacatggcgaaacccagtctctactaaaaatacaaaaaattagccgagcatggtgatgcacgcctgtagtcccagctactcaggaggctgaggcacgagaattgcttgaaccccggaggtggaggttgcagtgagcagagatcgcaccattgcactccagtgacagagctagacttggtctaaaaaagagagagagagagagagagagagattcattcctttgacttaagactttgttttctgttaaaatgcaaatagaaccctgtgaagtagacgttaagtccattttataggttagaaacctaaggctctaagggctccaagtgcacagcccattagtagtaaggctgggaaccttaatccaggtcttcacacaccccaggcaaataccagacggcttagagcactgagacccctatagaggcatcagtcacacgcccagaacaaacctgtctcaagtctcctgcagactttggtggtggggtagaaggtgaagaagtggtcactggaggatttggtattggggatgccctttcctcttctgctgcggcctgctccatagccccagaggcaaaggcacagtggggacccagatccaggcaggggcaggcaacaaggtctatgggcccgggtgtgctagaatgggctggcggggtcccgtggccccagaccctccaagcctttccatctctgcagagggtctggaggagcctggcctctctctcccgcatggcaacggacccagggaggtcaggacatgtgggtagagagacctggcagggtgctgagctagatgtagcacacctccaggaagcctggtaccttgtctccttccaagggcttggtacctgagaatacctgtggcccctcaccaacagtccaacctgcaccccggcaggggatctcttggtggccagcctgcgctgcccctctctcccatcatggctcccctgggatgaagactgctccagggagaagccagtggtagatgggaggaagaggggatttgaccatccggggccaaaaatggtcctctggggttgggctgtttcaccttgtgtccaggtgaggtttagtacatgagcccccatgctccatgcccttcccaccaggctgggctgggcagccctgattcagacctgttggccagaggcccttgttcatcacacatcatcatgccggaagttcctcctagtatctcacccagctccctcctatggcaacaggagctgtccttcagttctgcccgggggagggccccttgaagcatacgtgaggcacatgtccgtgtgacctgcctgtccctggctggatctgagttgtctgctcctgactctgacctctggactgacccctggtttgatccctgtgtggttggccaggaggggtggctgtagctaatgctgagctatcagcctcattgcctcaccaatcattaagtctgcctgttgcacagataaggagaggcttggagaggcgatgtctccctcgagatcacacaggcctttcatgcccactaagatggacgtccctgactcacaggaccaggcctggctggaaggcagtctgctcttcccatcagctacttgcaccctctaagactgagcacagggggctctcattctctccctgctccccaaaacaaatccatctacagattgatgcaaaacgtaccctcagactttgggaagtaaatacattcattaacaggtcacgtccccgccacgttgaaaggcagcaggtcccctcgcgagcgtgggtgcacgcatgggctgtgccagtcccttggttcttagtgatttgcacacttctgtgaatccacacacactctggtggatgctctcggacatgctcaaatggtgcaggcgctcccagcatgggtgcacccaggcgggcgggtgagacagaagcgcctctggacctctcacatgctagtggcaccggctgctaggactgtaagtcctggaggtcaaactgcggctgaggtgtcattcgtgactcagtctcctcctcccctctggcctggggaagggacaggggcactgagtactgacctttgctcccgctgcaagctggactgtgcctgattcaggagcagggttgggaccgatgggttccagggaggtgagccttgcaggagtaagacgtggctaacatttagtgatcacttttcctatgtgccagacattgttgcaagcactataagatcatctcagtgaatcctcacagcctaggaggcaggtacaatggttatgtctcaccaaggtaactgaggctcagagaggttatgagacttgcccaaggacacacaggcagtacgtgttggagcctggatgccaagccagggagtggactccagcatctgaccccaacaatcacggagagatggcacaggctgcatcaaaaaggaggcagcatggtagcgtggggaccactacagggcagtggggacccagcagaaggggtgccagagtcaggaggtcatttgactgcctttgaccctaggaaacattaagccacttctggaaactgaaaaaatgaacacaaagcaaattagagttagtacaattgtggtctactctgatggcgttcatttttacaaataaatgtagctcactgttgtcaggcactgcactcaccgacaggagccaatagtgcaacgtgcctggatgtcacctcatagtcactaggagtggtgtggtccggcagagggacccatgctgacgtggtgtgtcaccttctcagtggatgtttgtgtgtgattatgcatgcagcctcatttagagatccaatagacatctaagtagaagacctcctgggcaccaccaccattgccctccatcccccaatgggaggtcccctgagagcctcaggtcccaagattctgctcaagccagctgctcctgcccagggagtgtggctggggggcaagaagggcaggagtcaggcctcaggctggtcccacccatcaccctgcctctggcccacctggcgcccctcagagggctgagtctcactctgccactctcactagaggagggagcactctgctaccctccctgctttgctccaaatcaggaacacagtatgattattatacagtatgattattataataacagcaactatttttcagagcttactctgtgccaggagctctataggcagccctctgtatccttggtttctgtgtccatggattcaaccaaccttggattgaaaataattttttaggccgggcgtggtggctcacgcctgtaatctcagcactttgggaggttgaggcgggcggatcacgaggtcaggagatcgagaccatcctggctaacacggcgaaaccccatctctactaaaaatacaaaaaaaaaaaaaaaaattagccgggcgtggtggcgggcgcctatggtcccagctacttgggaggctgaggcaggagaatggcgtgaacccgggaggcagagcttgcagtgagccgagatcgtgccactgcactccagcctgggtgacagagcaagactccatctcaaaaaaaaaaaaaaaaaaaaaaatatatatatatatatatatatatttttttttttaaattgcatctgtgggccgggtgcagtggctcatgcctgtaagcccagcattttaggaggcagagattggaggatcacttaaggccaggagttggagaccagcctgagcaacatagcgacaccccatctccattaaaaacaatgttttaaaaaaattgcatctgggcagggcgcagtggctcacgcctataagcccagcactttgggaggcccacatgggaggattgcttgaggccaggagttggagaccagcctgagcaacatggtgaaaccccgtctctgctgtaaatacacaaattagctgggcgtggtggtgggtgcctgtaatcccagctactcaggaggctgaggcaggagaatcacttgaacctggggggcagagattgcagtgagctaagatcgtgccactgcactccagcctgggtgacagagtaagactccatctcaaaaaaaaaaaaaattgcacctgtactaaacatatacagacttttttggtgattacctcctaaacaatacagtataacaaccattcacacagcatttccgtcgtattaggtattataagtaatctagagatttaaagtatgtgggaggctgtgcttaggttatatgcaaatactatgccattttatatcaaggacttgaacatccatggattttggtatctgcagagggtcctggaatcaatttcccatggagactgagagatgaccgtactacccacttcgcaagcaatgtcttctttaatgtactgaaccatcccattgttcagaggagaaactgaagctcagggctttgaataactagaccaaggaggcacagcatgggagtgggacatgaagcactctacaattaaccctttcaggacaaggccctgtctcccacacccatctgcccaaaggctctccagggccccctcctcttgggtgtaccttgacaagagacctagattttagctcactatgctgtctgcagtcctggatggtcccactccagtgtctggtgctctg

SEQ ID NO: 612 - DNA, 25870 bp, Homo sapiens
cagagcaccagacactggagtgggaccatccaggactgcagacagcatagtgagctaaaatctaggtctcttgtcaaggtacacccaagaggagggggccctggagagcctttgggcagatgggtgtgggagacagggccttgtcctgaaagggttaattgtagagtgcttcatgtcccactcccatgctgtgcctccttggtctagttattcaaagccctgagcttcagtttctcctctgaacaatgggatggttcagtacattaaagaagacattgcttgcgaagtgggtagtacggtcatctctcagtctccatgggaaattgattccaggaccctctgcagataccaaaatccatggatgttcaagtccttgatataaaatggcatagtatttgcatataacctaagcacagcctcccacatactttaaatctctagattacttataatacctaatacgacggaaatgctgtgtgaatggttgttatactgtattgtttaggaggtaatcaccaaaaaagtctgtatatgtttagtacaggtgcaattttttttttttttgagatggagtcttactctgtcacccaggctggagtgcagtggcacgatcttagctcactgcaatctctgccccccaggttcaagtgattctcctgcctcagcctcctgagtagctgggattacaggcacccaccaccacgcccagctaatttgtgtatttacagcagagacggggtttcaccatgttgctcaggctggtctccaactcctggcctcaagcaatcctcccatgtgggcctcccaaagtgctgggcttataggcgtgagccactgcgccctgcccagatgcaatttttttaaaacattgtttttaatggagatggggtgtcgctatgttgctcaggctggtctccaactcctggccttaagtgatcctccaatctctgcctcctaaaatgctgggcttacaggcatgagccactgcacccggcccacagatgcaatttaaaaaaaaaaatatatatatatatatatatatatttttttttttttttttttttttgagatggagtcttgctctgtcacccaggctggagtgcagtggcacgatctcggctcactgcaagctctgcctcccgggttcacgccattctcctgcctcagcctcccaagtagctgggaccataggcgcccgccaccacgcccggctaatttttttttttttttttgtatttttagtagagatggggtttcgccgtgttagccaggatggtctcgatctcctgacctcgtgatccgcccgcctcaacctcccaaagtgctgagattacaggcgtgagccaccacgcccggcctaaaaaattattttcaatccaaggttggttgaatccatggacacagaaaccaaggatacagagggctgcctatagagctcctggcacagagtaagctctgaaaaatagttgctgttattataataatcatactgtataataatcatactgtgttcctgatttggagcaaagcagggagggtagcagagtgctccctcctctagtgagagtggcagagtgagactcagccctctgaggggcgccaggtgggccagaggcagggtgatgggtgggaccagcctgaggcctgactcctgcccttcttgccccccagccacactccctgggcaggagcagctggcttgagcagaatcttgggacctgaggctctcaggggacctcccattgggggatggagggcaatggtggtggtgcccaggaggtcttctacttagatgtctattggatctctaaatgaggctgcatgcataatcacacacaaacatccactgagaaggtgacacaccacgtcagcatgggtccctctgccggaccacaccactcctagtgactatgaggtgacatccaggcacgttgcactattggctcctgtcggtgagtgcagtgcctgacaacagtgagctacatttatttgtaaaaatgaacgccatcagagtagaccacaattgtactaactctaatttgctttgtgttcattttttcagtttccagaagtggcttaatgtttcctagggtcaaaggcagtcaaatgacctcctgactctggcaccccttctgctgggtccccactgccctgtagtggtccccacgctaccatgctgcctcctttttgatgcagcctgtgccatctctccgtgattgttggggtcagatgctggagtccactccctggcttggcatccaggctccaacacgtactgcctgtgtgtccttgggcaagtctcataacctctctgagcctcagttaccttggtgagacataaccattgtacctgcctcctaggctgtgaggattcactgagatgatcttatagtgcttgcaacaatgtctggcacataggaaaagtgatcactaaatgttagccacgtcttactcctgcaaggctcacctccctggaacccatcggtcccaaccctgctcctgaatcaggcacagtccagcttgcagcgggagcaaaggtcagtactcagtgcccctgtcccttccccaggccagaggggaggaggagactgagtcacgaatgacacctcagccgcagtttgacctccaggacttacagtcctagcagccggtgccactagcatgtgagaggtccagaggcgcttctgtctcacccgcccgcctgggtgcacccatgctgggagcgcctgcaccatttgagcatgtccgagagcatccaccagagtgtgtgtggattcacagaagtgtgcaaatcactaagaaccaagggactggcacagcccatgcgtgcacccacgctcgcgaggggacctgctgcctttcaacgtggcggggacgtgacctgttaatgaatgtatttacttcccaaagtctgagggtacgttttgcatcaatctgtagatggatttgttttggggagcagggagagaatgagagccccctgtgctcagtcttagagggtgcaagtagctgatgggaagagcagactgccttccagccaggcctggtcctgtgagtcagggacgtccatcttagtgggcatgaaaggcctgtgtgatctcgagggagacatcgcctctccaagcctctccttatctgtgcaacaggcagacttaatgattggtgaggcaatgaggctgatagctcagcattagctacagccacccctcctggccaaccacacagggatcaaaccaggggtcagtccagaggtcagagtcaggagcagacaactcagatccagccagggacaggcaggtcacacggacatgtgcctcacgtatgcttcaaggggccctcccccgggcagaactgaaggacagctcctgttgccataggagggagctgggtgagatactaggaggaacttccggcatgatgatgtgtgatgaacaagggcctctggccaacaggtctgaatcagggctgcccagcccagcctggtgggaagggcatggagcatgggggctcatgtactaaacctcacctggacacaaggtgaaacagcccaaccccagaggaccatttttggccccggatggtcaaatcccctcttcctcccatctaccactggcttctccctggagcagtcttcatcccaggggagccatgatgggagagaggggcagcgcaggctggccaccaagagatcccctgccggggtgcaggttggactgttggtgaggggccacaggtattctcaggtaccaagcccttggaaggagacaaggtaccaggcttcctggaggtgtgctacatctagctcagcaccctgccaggtctctctacccacatgtcctgacctccctgggtccgttgccatgcgggagagagaggccaggctcctccagaccctctgcagagatggaaaggcttggagggtctggggccacgggaccccgccagcccattctagcacacccgggcccatagaccttgttgcctgcccctgcctggatctgggtccccactgtgcctttgcctctggggctatggagcaggccgcagcagaagaggaaagggcatccccaataccaaatcctccagtgaccacttcttcaccttctaccccaccaccaaagtctgcaggagacttgagacaggtttgttctgggcgtgtgactgatgcctctataggggtctcagtgctctaagccgtctggtatttgcctggggtgtgtgaagacctggattaaggttcccagccttactactaatgggctgtgcacttggagcccttagagccttaggtttctaacctataaaatggacttaacgtctacttcacagggttctatttgcattttaacagaaaacaaagtcttaagtcaaaggaatgaatctctctctctctctctctctctcttttttagaccaagtctagctctgtcactggagtgcaatggtgcgatctctgctcactgcaacctccacctccggggttcaagcaattctcgtgcctcagcctcctgagtagctgggactacaggcgtgcatcaccatgctcggctaattttttgtatttttagtagagactgggtttcgccatgttgcccaggctggtctcgaactcctggcctcagatatccgtccgtcccagcctcccaaagtgctgggattacaggcatgagccactgtgcccagccaggaatggatcgctaatagaggaattccaagtctcacccaccgataaagaattctgagggcagagccgggccactttctcaggcctctgatttcatactgtggtgttagttacttctgagaggacagcttgctgccagagctctattttttatgttagaggctccttctgcctgcagactctgctgtctgggaagggcacagcgttaggagggagagggaggtgtgagtccctccatggacccgctgctttgtacttctctatctcatttccttttcagcaccactctgggcaatcagtattccagccccattttatcctcagaaaattgaggctctgagatgttatctctgtgacctgggtcctattacgtgccaaaggcatcatttaagcctaagatgtcctggctccaaggtgtcagcatctggaagacaggcgccctcatcctgccatccctgctgcggcttcactgtgggcccaggggacatctcagccccgagaagggtcagcggcccctcctggaccaccgactccccgcagaactcctctgtgccctctcctcaccagaccttgttcctcccagttgctcccacagccagggggcagtgagggctgctcttcccccagccccactgaggaacccaggaaggtgaacgagagaatcagtcctggtgggggctggggagggccccagacatgagaccagctcctcccccaggggatgttatcagtgggtccagagggcaaaatagggagcctggtggagggaggggcaaaggcctcgggctctgagcggccttggcccttctccaccaacccctgccctacactaagggggaggcagcggggggcacacagggtgggggcgggtggggggctgctgggtgagcagcactcgcctgcctggattgaaacccagagatggaggtgctgggaggggctgtgagagctcagccctgtaaccaggccttgccggagccactgatgcctggtcttctgtgcctttactccaaacaccccccagcccaagccacccacttgttctcaagtctgaagaagcccctcacccctctactccaggctgtgttcagggcttggggctggtggagggaggggcctgaaattccagtgtgaaaggctgagatgggcccgaggcccctggcctatgtccaagccatttcccctctcaccagcctctccctggggagccagtcagctaggaaggaatgagggctccccaggcccacccccagttcctgagctcatctgggctgcagggctggcgggacagcagcgtggactcagtctcctagggatttcccaactctcccgcccgcttgctgcatctggacaccctgcctcaggccctcatctccactggtcagcaggtgacctttgcccagcgccctgggtcctcagtgcctgctgccctggagatgatataaaacaggtcagaaccctcctgcctgtctgctcagttcatccctagaggcagctgctccaggtaatgccctctggggaggggaaagaggaggggaggaggatgaagaggggcaagaggagctccctgcccagcccagccagcaagcctggagaagcacttgctagagctaaggaagcctcggagctggacgggtgccccccacccctcatcataacctgaagaacatggaggcccgggaggggtgtcacttgcccaaagctacacagggggtggggctggaagtggctccaagtgcaggttcccccctcattcttcaggcttagggctggaggaagccttagacagcccagtcctaccccagacagggaaactgaggcctggagagggccagaaatcacccaaagacacacagcatgttggctggactggacggagatcagtccagaccgcaggtgccttgatgttcagtctggtgggttttctgctccatcccacccacctccctttgggcctcgatccctcgcccctcaccagtcccccttctgagagcccgtattagcagggagccggcccctactccttctggcagacccagctaaggttctaccttaggggccacgccacctccccagggaggggtccagaggcatggggacctggggtgcccctcacaggacacttccttgcaggaacagaggtgccatgcagccccgggtactccttgttgttgccctcctggcgctcctggcctctgcccgtaagcacttggtgggactgggctgggggcagggtggaggcaacttggggatcccagtcccaatgggtggtcaagcaggagcccagggctcgtccagaggccgatccaccccactcagccctgctctttcctcaggagcttcagaggccgaggatgcctcccttctcagcttcatgcagggttacatgaagcacgccaccaagaccgccaaggatgcactgagcagcgtgcaggagtcccaggtggcccagcaggccaggtacacccgctggcctccctccccatcccccctgccagctgcctccattcccacccgcccctgccctggtgagatcccaacaatggaatggaggtgctccagcctcccctgggcctgtgcctcttcagcctcctctttcctcacagggcctttgtcaggctgctgcgggagagatgacagagttgagactgcattcctcccaggtccctcctttctccccggagcagtcctagggcgtgccgttttagccctcatttccattttcctttcctttccctttctttctctttctatttctttctttctttctttctttctttctttctttctttctttctttctttctttctttctttctttcctttctttctttcctttctttctttcctttctttctttctttcctttctttctctttctttctttctttcctttttctttctttccctctcttcctttctctctttctttcttcttcttttttttttaatggagtctccctctgtcacctaggctggagtgcagtggtgccatctcggctcactgcaacctccgtctcccgggttcaacccattctcctgcctcagcctcccaagtagctgggattacaggcacgcgccaccacacccagctaatttttgtatttttagcagagatggggtttcaccatgttggccaggttggtcttgaattcctgacctcaggggatcctcctgcctcggcctcccaaagtgctgggattacaggcatgagccactgcgcctggccccattttccttttctgaaggtctggctagagcagtggtcctcagcctttttggcaccagggaccagttttgtggtggacaatttttccatgggccagcggggatggttttgggatgaagctgttccacctcagatcatcaggcattagattctcataaggagccctccacctagatccctggcatgtgcagttcacaatagggttcacactcctatgagaatgtaaggccacttgatctgacaggaggcggagctcaggcggtattgctcactcacccaccactcacttcgtgctgtgcagcccggctcctaacagtccatggaccagtacctatctatgacttgggggttggggacccctgggctaggggtttgccttgggaggccccacctgacccaattcaagcccgtgagtgcttctgctttgttctaagacctggggccagtgtgagcagaagtgtgtccttcctctcccatcctgcccctgcccatcagtactctcctctcccctactcccttctccacctcaccctgactggcattagctggcatagcagaggtgttcataaacattcttagtccccagaaccggctttggggtaggtgttattttctcactttgcagatgagaaaattgaggctcagagcgattaggtgacctgccccagatcacacaactaatcaatcctccaatgactttccaaatgagaggctgcctccctctgtcctaccctgctcagagccaccaggttgtgcaactccaggcggtgctgtttgcacagaaaacaatgacagccttgacctttcacatctccccaccctgtcactttgtgcctcaggcccaggggcataaacatctgaggtgacctggagatggcagggtttgacttgtgctggggttcctgcaaggatatctcttctcccagggtggcagctgtgggggattcctgcctgaggtctcagggctgtcgtccagtgaagttgagagggtggtgtggtcctgactggtgtcgtccagtggggacatgggtgtgggtcccatggttgcctacagaggagttctcatgccctgctctgttgcttcccctgactgatttaggggctgggtgaccgatggcttcagttccctgaaagactactggagcaccgttaaggacaagttctctgagttctgggatttggaccctgaggtcagaccaacttcagccgtggctgcctgagacctcaataccccaagtccacctgcctatccatcctgcgagctccttgggtcctgcaatctccagggctgcccctgtaggttgcttaaaagggacagtattctcagtgctctcctaccccacctcatgcctggcccccctccaggcatgctggcctcccaataaagctggacaagaagctgctatgagtgggccgtcgcaagtgtgccatctgtgtctgggcatgggaaagggccgaggctgttctgtgggtgggcactggacagactccaggtcaggcaggcatggaggccagcgctctatccaccttctggtagctgggcagtctctgggcctcagtttcttcatctctaaggtaggaatcaccctccgtaccctgccttccttgacagctttgtgcggaaggtcaaacaggacaataagtttgctgatactttgataaactgttaggtgctgcacaacatgacttgagtgtgtgccccatgccagccactatgcctggcacttaagttgtcatcagagttgagactgtgtgtgtttactcaaaactgtggagctgacctcccctatccaggccccctagccctcttaggcgcacgtgaagggaggaggccggatgggctagaggttggagtaagatgcaacgaggcactattcttggctccaccacttgatatcagcctcagtttcttacatgtaaagtggatacaaccgtaccccctccaccgtaggtttgccgtgagattgaaatgagagagcgttcgaaccgtttggcacagcacctgcacgtaaagatgcttgatcaatgttgtcatgattacagttgagctgactgggcccttgggacccggactggagtggtggggggcagtgtcctgggaccaaaaagaagcacaaggtctcccaatagaggctgcttcctttgtgtccccaccacccgaaagatgtcaggtcagagagcccgagagctgcagatggcttgagtagggctccactcttcagatcaaaaaactgtggcccggagaggcgaaggcacttggccagcatcacagagccagcacgtggcagggccagaccttgagcccaggtcagctgcgtgtattctgctcagttggtgcagaaaacagttttgtcactcctatgtcaggtgttagggactcctttacagatctcagtggcatcagtacatccagccccacctggagactgctttctctctgaaaattccccagggcttctctctgggctgagagatctcagcacccgtatctagaaaatgttcccacccagacctggctggatgactgctgttgtagctctggaaggttaggaactaaaaagcccactcctttacctagggtagctaagatacactggagatggggacatggggatggggccgattatccaggggcctgcatgagggggcaaaaggccctgcagagagagggtagggaaggcactgcccagatctgtgaagccatgtgcgtgcacgcggggacattcagacatgagtgcaaggagggaccgtgagcagggaggtcatgtgagaatacacaggcatgcctgcacacccatgtgaacttgagtgccaggccacacactcttttttttttttttttttttttagctggagtcttgctccgtcgcccaggctggagtgcagtggcatgatttcggctcactgtgacctctgcctcccaggttcaagcgattctcctgcctcagccttcctagtagctgggattacgggtgcaagccaccatgcccagctgattttttttgtatttttagtagagacagggtttcaccatattggccaggctggtctcaaactcctggcctgaagtgatacgcccacctcagcctcccaaagtgctgggattacaggcttgagccaccgcacccgacccgcgcactcttttcaataatcatggatggccaggggtgcagggtctaaaaagcgcggcctagcccatcctgctgttcactgggcaagcgacgtcacaggtccaggcttcagtgtcctcatccatgctctgcgtctgatggcaatctagccaggatgtggggaagggaggatgcagtgagagcacagatatgagagcatcttggaaataaaaatgtacctgcaagaggtggtggtgaattttcttactcaggccagcttctgccagggctggcagaaagagggggtggcatggcatggagccgcagggggtggaggactggcttccactgctgtgcctgaggaagccgcggctgtttctgggcgggatgggagtagtgggagggggatactggccttgtgagaagaaaagggaagtgtctgtttgagaggtttttgaattagtaaaggaggacaggcgcaaactccaagcgcttcacttgcacccgggaccaaaccccaatcccagtggctggctccctgaggccgccccgctccgtcccgccccgctgacagcggctgggctggagaaggctctatacggacacacctctggggacggggaacccactgctcccagctaaagcaaccctgtttcctggcccgcctcagacagggctgcaggccttgtttgagcccctttcagggcacctggccttggattgtctgtggctttgcctggtccgctgtgacttcctttctacttgagccttgctaaggcagactctactccctcactcgtaagcagccaggcgtccagcaggtcctccaacgtcgatcttggccctaagacgtccagtctgggcacggagttgttgagatccggcaggaagtccctgctccagggccaaaggccccacccgggctcccccggatgtccccgcacccccctctattctcccaaaagaaagaagctgcttcccactttggaaacgtttattctgagcaccgggaaggggggcggcggcgggcgcctcactgggtgttgagcttcttagtgtactcctcgagagcgctcaggaagctgaccttgaagctctccagcacgggcagcaggccttggcggaggtcctcgagcgcgggcttggccttctcgctgagcgtgctcagatgctcggtggccttggcgtggtactcggccagtctggcgccgccgttctccttgagagcctcaaggcgcgcggccaagcgctggcgcagctcgtcgctgtagggggccagatgcgtgcgcagcgcgtccacatgggcgcgcgcgcggtcgcgcatctcctcgcccagtgggctcagcttctcttgcagctcgtgcagcttctggcgcgcgccctcttggagctctgcgcgcagcggctccaccttctggcggtagagctccatctcctcctgccacttcttctggaagtcgtccaggtagggctgcaccttggccttcacctcctccagatccttgctcatctcctgcctcaggccctctgtctccttttccaggttatcccagaactcctgggtcacagggccgagctgttcgcgcagcttgctgaaggtggaggtcacgctgtcccagttgtcaaggagctttaggctggagggtgagacagaagggttgagggctggcctcccagcgccccagcctatcaggggtgagccctgggtgacacctgtccgcggaggtgcagtggcctagcatttccagtacactctcaaccaacacccctgccccgccaggccatgccccgttgtgcagctggaccgaggcacagagaggagctaaaaaggagacagagctgggactagtgcccagttacgttggtctccaaagtgggcccttgaaggacctcgcttctatgcctccagcgcattctcctctccgaagacagcccacagtcttgctgggcaggagcagaggaggtggtgaagaagggaaaggggcttgctacacttgcaggcacaatgtggctctgtgatcacgcatcgggcagccctggtctgtcctttgcaggggacatgggctgtgaccctgcctggagatcccattccagtttctccatccagaccatctgtggggcccagctcatcagatattaggtgaggactcggccagtctggcttcaacatcatcccacaggcctctgccccctacccctgccctcaaccccaggctgggtccttactttagctgttttcccaaggcggagccttcaaactgggacacatagtctctgccgctgtctttgagcacatccacgtacacagtggccaggtccttcactcgatcccaggggctctgggggggttcatcttgctgccagaaatgccgagcctggctccctgagggtgggaggggagacccagatcaggccagctgtgggctgagatctgagccgaaaggccaagcttggaggtgggggagagggggccagtgagaaacctgctgcctctgcccaggagggtgggccacggggatttagggagaaagccccccgatggttggctccctaggttaggggacacctacccgtcaggaagagcacggccaaggtcagcaccgcagctttcatcctgaagggccgtgggggacctggaggagaagaagggcctggctgagtggggtgccttcagcatgcagaagccccgtgctcccccactcattgcagccaggtgaggagaagggcacagagcgggagaagacctcaggtacccagaggcccggcctggggcaaggcctgaaccttgagctggggagccagagtgaccggggcaggcagcaggacgcacctccttctcgcagtctctaagcagccagctcttgcagggcctatttatgtctgcagccagggtctgggctgggaggctgataagcccagccccggccctgttgctgctcactggtcctggcaatgtggaacttaagagttcaaggatcagctctgtccctggggctgggcaaatagagtgggcaaacagcaagctgcgggggctgcagggcaggggtcaagggttcagtgggggcgggaggggagtgtctgcaggcttgcaggtctcccgggtggggtcggggttccctgcactcatccccttcccctccatgggagtgtgtgggcagttgccattgtccattgtgttggcagaggaggggaggggagggacgctgggactcctccaccaaggagactgcctcccccaccaccagcattccagggagactacttcactcccctcccccttcccccgccctgtcctcccaccagtgctcttctttagtccccagcaggtcctccaggcctctctccaagcctcccaaactggtaaacctggggagaggggagagccctccgtggctcccagactgaggtttcggagacctcttgcatttcaaaacactccagagatcaattcggagctgccaacttttaattttgtcatgtaaagatattgtccgcctccaaaaaaccctcaccatctacagtgaccatcacttcaaaaaggaaaggctttaacaaaaaagggcataatctcagaattacattacagaattgaagccccttagattgaagacgtctccctttgcattgttcacacttatatttgatcacgcacaggtgtgactggatctcagcccttgggaagccctggtgtggggagaagacctctgggcaaaggaagtggcaggagacctgctttctcatttcacttggcctccatcttgctggaggaagatcgtgggcaagttatataatctctctgagcctcggttttctatctgcaaaatggggcaagaatggtcagggttgttggaggcccctgagacagcctgtgaatgtaaagtgctgtgtgtccgttggtgtttgcagcaccatcttgtcaggtttctcctggaaggcccagacctcccccagcaggttactgataggacctgagtcctagagcctgtgatgcaggctgagaggaactgtgacatcactccagcctctccccatgccaccatctcacagatgaagagactgaagagcacagagggactttgcccagaggctgtcatctctcagggagttagaagaaaggctggacctagaacccagtctctggacttgggatgcagggcagaaatgtaccctgtaccatcactccaggaaactccctaacactagaaaccaggctgacatctctgtttaccagatcagggagtggtcggcctcatgcctttcacttcagagaagattctggagccagaaaacctcaaatctaagggtcaggcaggttcaaatccagctgcctgaccctggatgagttatgatacatcacctccccacacatcagtttctgattgaagataatgatagaatatgccatcgccctgagttatggcaggggttactgtgtggcaagcagaataacgctccccaaagatgtccacagcctcatccctggaacctgtggctttgctaccttccatggcaaaaaaagattttgctagtgtgattaaggacctggagatggggtggttggcctggattctccaggtgggcccattgtcatcacaggggtccttaattatacaagagggaggcagtggcctcagagtcagagaaagagatgtgaggatggcagtggagatcagactcgtgactgctggaagggggccatgagctgagggacatgagcaacccttccctagaagctggagaaggcaaaggatttttccctgcagcctccaggagcacagctctgctgccaccatgattttagcccagtatgacccattttggacttctgtcctccataactgtaagataataaatttgtatcgttttaagcatgaactttgaacatatatgcaaaactgttagaaaggtacctagcacttagtaaacagtaactattctgttttctagaatcccagtttctggtaatgtattcccttattcccactacacttgctttatcagatctgagacctcagcttctgcagcaggcatgaaggcagcagtcccacatctctctgcttgtccttgacttgcagttgctgagatatggaacatcttttctaggactgaagtggccccagatgtctatgggactgtgtagacagggaggtggccttggtgagccatcagcctgggctgcctacttgaccatcccagctgtctgtagctttagaaagtgggaaggtggctggtcccctgctgggacagctcacaggtgtctcgggccaagagagcgtcttttcttttggggggtagagtttgtcccagtcagcacatgggggaatctcagaagcttactggttggactccaagatacttgccagtgtttcacccttctctttggtttgttactaaaatgattgttatggctaaacctagtatttaacatttgcgcagttctttgtggccaaagcactttcacaacttagaatatccctataaggctggaggccagattttacccttgtgatttttgcctgtgggaaaactgcagctcacagctgccctgcatccttcagcggttactatttagcgctggcaggggtgggaatcgggaggcctggcttctagttctttgagggtggccttgcacccttgcggagcctgcagcctttgcagtctgatcagggacttctcagtttcctggctcagggactgcgaggcatcaggatagggggtgctgttgaacagcatcttaccaagcaggcagtttccttttctaaatatacttattcaccagggtggctactccattttattgcaaggtatttggcttaaactagtctaagccccctttactaatattttggaaaggaaggaggtctttctggacagagctgatggaaaaatacataacaacaacaacgacaataacaaactgggttgatgacacactcagactcagggtccagccaggcattgttcaaggcactcagtggccacgggttggactgtttggtggctgcggggcccacagtgtaggcccctgtttccacccatttctttccctcgtcttgggagtctccagagcgactgctcctgaacagggttaccaagtcctggccctggatgccctgacatgtgtaggagtgttggcggtgaccgcaagagtggattttgcacagaaagattagcaactcctttcacaatttatgtccaaacatactggtccatctgtatcgggaggactctgtcccctgctaggtctggcacataacagacacctgccaaacatctgctcagtgaatggcactggcaccctagagggagggtcaccagcctggtcatagggaggagtgggtcctgggaggggaggcagtctcataccagcccctgctcagaacgtttcttctgggagcacgtggtatgagccagaatgagagttagggaggggaggtggtgactgagcaggggagacaggacccccacccccagtagttcctacttttggcaattttgctgcagcttttgtgatagagccccaagttagacccttgggtggggcaccgtagccagctatgcaagattctctcctgccctcctgcttggaaaagactaaggccaggacagagctcatctttgatcagcaggagggaagcacagtagccctctgagttcttgatctttgcagttggggtggggtgggggctggcacaaagtcagaaagaaaactgtgtagagcacggttttctgtcaacatggctcctgttttctggagctaagctctccagtctgtatccaggagccagtgccctgcttcctacaaaagctcaccctacctctggtccaaaggcaccctggctgattttaggagggagtggcacctattgcaacaggtgctacaatttgctggaaggcatctgggtattatcactgtttgattctagagactcacctagtcttgcatgacagcgtatacagactcagaggagttttagaaggcccttcttttttttttttttttttttgagacggagtctcgctctgtcgcccaggctggagtgcagtggcgggatctcggctcactgcaagctccgcctcccgggttcacgccattctcctgcctcagcctcccaagtagctgggactacaggcgcccgccactacgcccggctaattttttgtatttttagtagagacggggtttcaccgttttagccgggatggtctcgatctcctgacctcgtgatccacccgcctcggcctcccaaagtgctgggattacaggcgtgagccaccgcgcccggccagaaggcccttcttgagaaggctcttttcttctctaatctaaatggccctacagcaactttctagccgccctcatggacttgaaatctttcttttctctttgcaggagtgcagtggtgcgatcacagctcactgcagcctcaaactcctaggctcacatgatccttcagcctcagcctcctgagcagctgggactacaggcatgtgccaccaagcctggttattttttgtagaggtgggggtcttgctatgttgcccaggttggactccaactcctgggtttacctaattctcctgcctcagcctcctgagcagctgggattacaggcgcacgccaccatgcccagcttggaaggctttctaaattccctcctctcattcttccttctgtgaactcagatggtctttccagcttcagtaagctttcttcatagaagaccttcaaccacctgtctcttagccatgcctggaaacttgctggaaactctaccctgccctttggagttcaggtgtgggataaaggagaaaactataggaaaattccacccccgctccgctttttttttttttttgagatgtagtatcccgctgtcacccaggctagagtgcagtggtgcaatcttggcttgctgcagtaacctctgcctcctgggttcaagccattctcctgtctcagcctcctgagtagcagggactacaggcacctgccaccacacctggctaatttttgtatttttagtagacacggggttttgccacattggccaggctggtctcaaactcctgacctcagatgatccacccccatcggcctccagaagtgctggatttacaggcgtgagccatgccaggcccctccctttctttccaaatacttatttggctatcctttcactcggccaatgggggtcacgtcatgaagggtccagcctgtgtccactctttaaggatccttccctgtactcttcaaaagtgccctttcaaggaagctgttttccacctggcccagcaaattcaaatgctcccttctgacagggcagagtccgagctgggtgcccagggacacagtgtgaagcagagttcaggcttctagagaatgcgagtttcttaagtcactcaaagccccacccttagcctgggagacctctccagcctccactgctccagctcccacctacctgaggcttcttccaactagactccaaaccacaggcaaataatctatcagcctaagaacacaatcaggctcctatctacacaacttcctgctgtccaactaagtaaccaagttgtaagtaagtgcctcacaaaaggaaggacaaaaggcaggacaaaaggtcttagcaacttgagtctggagattttttttttaatcctttttagttcaacataaaatgagaaagaaaaaaatatttctgacattttcaaagaacagaaataggaaagtatgttcatatacattcaacgtatactgcacatattggttactacaatacaaagcaatgagttttttttaaagtgtagtttgcaagatggcacggttagtaggctcactggctttcatctgttgttgctggagggtgcagtctgctctcccatacatacagtaccatgtaaacacatcaggctgagcgcgtggtggtggtagggcaggttgggggcataagagttggaacaagcgcagataagtcaacagctttttagggctttcttggtaagcccccttctggtgagtagttggtgaccccaccaagtggaggggagactggggaccatggaaacatgggacagctcccacgaagggctcttgcactgcagaattccactcaagggatcttgggtccaggagccgagctgccagtatcagtggagaaggacaaggtgcatggggatcccgccagcaacatcaggatggccatgccgggcacccgctttcctctgtgcaaattcaggatgaaagactaggaggggactcgggacctcttgctctcctttcccagaaaaaaaaagggtggaagagtcagtgtattcaaggtctctctcttgttttgaagatcagaaggagataacccagaccctctctcagccccagccagcagagaagactttggtttctaacaatgaagagaaataaagataacacaaataatagctactgcgtatgcactgcttcaactggggaaaggagaccactgcatctgtcactggcacaagtaagagctgttcacaattacaatgcctaaaggaaatactttgaacaaaaggtgcaagtcacaattcaaatagaacagaatctggttaaacatttctcatttaaacaaaaattccttttctctttatttattaataatgataataacaataatatcaacatttaccaaaaacaatttctacatgatcaagaattaaaatataggggctgagggtacccagtggggaagaggaggttaggagagaggcagggcccaaggcaacctcctacacttcttccctgtgacaaagaggctgaaagaggagagcatatatatatatattttatatatatattatatatataatatatatataatatattatattatatattatatatataatatatatatacacatatattatattatatatatacacacatatataatatatatatggagaaacaatcctttttatagcacaatataaaatgagaatgaaagatgccatagaaagcatagtgcactgctgttgggtgttcagtccatggataaaaccagcaggatgataaaggcaaccaactttccaggttacaagaggggagctgagttatccaccaaaagcaaaggctcaaattgagacatcctaactggcaaaccatctatgccaggtcattctcagcctccgtgccaaactcttcatatgatcttggctaggacagacatgttttccgtggatcccagcagtaaagacctctctgcgttccaggcttgggggtttctctttttttgttctttttgttttctaagtgccagaagccgtcacccttcctctctccctttgcctgccattaggattccagaggatggcatcctttagtatttgctttcacagaagagcaatgcagggggatggagggtgctctgctgatgaaggctagggagggagtggccctgaggccgctggcctctgaactctaactgctttgctctcctgtttcaaaaaaggaacgaaagaaaaaaaagaaaggaagaaaaaaaagaaagtatatcacctctggaagaaaacataccaaaaacaaaacaaaacacaaacccccaaacaaaacaaaaaaccaccaactcaaatatactttcacaaaagatggagaacatggatttccttcctgtttatttccttggtgacttggtcatacaagcaaacatggcaaaaccctctcagaacccaaaagaacagcacacggatgaaccaaatgtgaggaaagcagctgtgatattttgggtggagagaaacacaagggcaatttggcacaacgctgctagatactgtgggtttacaatcaaccttttcattcccaagctgtacacaaaacctggaataaagcagacacagaggagaattagtttgaaaagagaaaggctcaaatattccatttaaaaccttttaaaaaatgcaacgggtttactttccctcaggtgttcaggtagcttgccatactgaggctctgatgtggatttgccaagtggcttccctttcatcaggcctcttctgtcaaggattttccagatacaaccaatggtgcctgctgtgtactctttgcattactccagccaaacaagccaatttccccattctttctaccatgggcctctcatcacacatttccctaatctggaatatcctgccacttgcttctgtatggccttaaaaaatatggctggacatattttcctgccaggttttgtcttttaggactgagtttaaggacttcctcctttcctcattatgctgaccggaggtcacctgcatcctctggagccgtagctcacttctgtcgctatgaaggctagagcacctgtaacacacggcgagtcttgtgtcttattcccataaccgaaccaagagactgtgtttagcatttcttctgcacacccccacccctacctcgcgccctaaaactagcagcgtcgttaatgaaaagcaagaaactgtgaaggccacgaggggaggcgtggtactgtcgactgcactggccaccacaacacatgggctgaagctcctgatgggattgggagcaggcactgggccacagggctggtttggctctggccagggtgacactcactctctgtttcttgttacacgcctgcctgctccatgctgaaggagacttcggggtgcttgtagctgagcagaatgtctgtaatacacgtagatggatagcaagaggagtttaaatgctggctgccatcactcaggtctgggtgctcatgacctcccaggcttgccccacattctgcaagaccaaaaagaacgtatgaggttggcagggaactgggggactaggagagcaagggggagagagaggaggaattgaaggcaacctgtcgagcatcccacagcctgactcccagccctgaattctagctcacagcaggccctcaaggtgttgagtgacgatgggcgggggccaagattcttcctatattctcctctacctgttctgcttttttcccttttcctttaccctttcccatccttaggtaagatcaactactgtagtgtgagagaagatagaggactccttcagaaaggatcacctcttaaagagtgaaagggagaataattttactgcctgcaggcacccattcctgggcactgtctgtcttccagacactgtgctaagcacttgatactcactaagccagccagccctcagggcacaatgtaggataaaggctctatcgtttttgccactttacagatgaggatctcggggtccagaaagccaagtgcctcacctgcagagcctgaaaaggacagccttgggactggtggcagacctgccccgcccaaggcctacgcctattatttgttatgacaccctcccttgactggctccaagaagaggtagaaatgtgccattaggacctgatgccctctaagcagaactggaaaaagtgattgaaggcatatcatcacagagatgagagacaggaatgggagagccctgtgccatctggccagaagccacacctcctttacacacccacactcagggaagaccagtggggaaaggggctgtgtccagaacctgtgggatgctgtggctctacctccccatgagctcttcctacgaagagaggagcagttacggaagatggagggaggcccctccaggaacttctctggagtgccccatgcataaggctcctcaccctcattttccccatcctgaaactgctggctgcccatgagcgaagactgactgagaactgcatccgacatccgggcagagctaagtgctttcccagccacgagactcattcctggcaagttatccagctgtacctgcagaaaacagttaagagaagaaataagcacacaagacaccactctcaggcaacccctagagacagctggtccttctgaaggagcccaggcaaaagacagcccggggccccactccagactccttcctctaaagcaccacccaaagggggtgctccacagcgacagtgtgggaagctgcttggctctgcccagtgggggggctgagggtggggcggatgtggcaaatctcagctggtggtgacatcttgatacctacatggccttctaaaaccaggtttctgacctatccccatctccactgggactttgtcttaggacagcaccgtccagtcacactctgcagtgatggaaatgttctctgtcctgtccaatatggtaaccagtagccacaagtggctactgagcacttaaagtgtgactgggctgggcacggtggctcatgcctgtaatcccagcactttgggaggctgaggctggtggatcatgaggtcaggagatcgagaccatcctggctaacacggtgaaaccccgtctctactaaaaatacgaaaaattagctgggctaaaaaaatttagctctactaaaaatacaaaaaagggtggcgggcgcctgtagtcccagctactcgggaggttgaggcaggagaatggcgtgaacccgggaggcggagcttgcagtgagccgagattgcgccactgcactccaacctgggtgacagagcaagactctgtctcaaaaaataataataataaaaaataaagtgtaactggtgtgactgaggaactgaattttaaattgtttttaattttaattggtttagatttgaatagccacatgtggctagctactagactagcaccaccctaggaaaacaaaactttgctgaggcccaccagctcccctgatctgagtaagctcaatgtagctgctgaaaaataaccagaagcctatgggctcatttgctggggcctgagtttagactgagaagaggtttaataaccaaaactacagggaacagatggcaactatttctgattctttggtctaaaatttggagcatagattctacttgaattaaggtttggtctgttagggtgactcaaagaaaatgctcttaaggtaggcgaattgcctgagctcaggaattcgagaccagcctagccaacatggtaaaaccccatgcctactaaaaatacaaaaattagccaggtgtggtggcaggcacctgtagtcccagctactcaggaagctgaggcacaaaagtcacttgaactggggaggtagaagttgcagtgagctgatatcgcgccactgtcctcccgcctgggcgacagagtgagactccatctcaaaaaagaaaaaaaaagaaatgctccccaccgtttccagaaaggctgaatgctgactgaggagagcggccaagagaggctaccccacatcactatactctgtttcaaggctgggactgggaggatccacctctgtgcagcaggtgggaccaacatacataagcatcgtcgctgttctggatcgtgtggtgtctctggagggcccggggcctgtggtgctcatggacggaggggcgtgctgggtacccgagcccattgtgatccggcagctccactgcttgtcctggagaacttctatccatgcagttccctatgacaggctctgaggagacacagcagaatagagtcagtggggcggaacttctcccagcactggaaactcccatccaagaaatgtcttgcaagggacaatgggcaaggctgaggagatcatgtacaccaaccgctgatcctcagccggcgtcatggcttagaggagcctggaccagccctccaaaagacgagctgtaggggaggggaccacacccttagggaaaaaattccacgtaacagggcatggctggaccccaccgaaccttctcttctttcatttctctgttgaattaacagtgatctattcccaaacctaaatgcacatgagaattactctcggagctttcag

SEQ ID NO: 613 - DNA, 153107 bp, Mus musculus
ggacattctacaattctcagagatcagtgccttgctcagccatcctcagagaagcttccttctgcagcaggtgggaacaaatacagagagtcacagtcagataataaatatgcagagagtgagagactttggaacacagggccctactctgaatgcctctatcaagcccctcccctcggggctcagggaaccgtacagaagagttggcagaaagaatgtaagagctggagaggatgggagacactaagaaaacaaggatctccaattcaacaggattaaagtctcacagagactgaggcagtatacacaggagtatatggtatacaccagatgaggtcctagagatgacaagagaaatggacacaagccctgccccccaacccagaagcaatctctgactgatgaccactagccaatgaaaatttagtttactccaagagagtctaaatggggagacaaactactcttaaaggtcggttgcctgcccagcagtagatgctgatggaaaacaaactcaacagcattgatggcggtttcatgcctcataacatcagggcttttctcattttaaatctttatttttattcttttctctctttttaccttacaggtaatatatactgttgggtatatattatgacttccaatttggtgtttttatggaattacggaatgcacaaacaagtgggtctctgtgtctgtatttatttcttgggccatttcccttcagttatgtcctatttaagtgtgttttcttttattttatcttcatcttccttccttttttccttccttccttccttccttccttccttcctcccttcctcccttcctcccttccttccttccttccttctctccttcctcccttagctgcctggtggggaggtagggaagatctgggatgagtagagtgtagggaaaccacaatcagactatgtatgaaaaaattatatttaataaaaaaataaagctgggcgtggtggcgcacgcctttaatcccagcacttgggaggcaaaggcaggcagatttctgaattcgagggaggacagcccggtctccaaagttagttctaggacagccagggcaacacagagaaaccctgtctcgaaaaacaaaacaaaaaaataaataaaaaataaaggtaagagtactagagtaggaaaaaatgttgtctactgaactgcttagcaatcctatttttcaaaaaatattttaagtaatcttttgagtatgtgtgccaagattagaccatgtttgcattttcatgaatatgtgaaatgagacacaaacggcagggtgtgccctcaaggtgtgatgtgtatttaaaaagaggaacagaaatttgcatttgtttgcatagaaaaaaatccatgatatattatacagaaaaaaaaattagcttacccaagaggatatatatagagcatggattttaaaatgagaatgttcccaagtgtgtacattttattctaggaaaaactctgaagaaatgaataccagagactaacagaagtcctctctggataggggcctagagatgatggctaactctccctcctccccctcctccctatcttcccctcctccctccttcctcttctccccctgatccccctctcccttctcctctccctccctctcttctccccttcttctattagtccttttattttatacctttgttatagtctgaacatttgactatgaacactagtactgcacatatttaaattttacttctgcttggtaagatgactcagttgataacagtacttgcttccaagcctggtgctctgagtttgagccttgggactcatagtggaagaagagatctgacttccagaattgtcctctgacctgcacacacacacacacacagacacatgcccctccccatgcaaacaataaaataagaaaatttgaaaagaaaaccacagagttttatcttcagttttataagactcatgtgcttttaaatcttgagttttagtctatgttaaaaatttcccaagtcaaaatagatttatttaaatgtcacgccactctaaaaatgtttttgtctgaatactacaaaacatcactgtagctacacactccagtactactgagtcaaactttattgtttcttgtttagctaactttgtgccttttaatatgtgtgggttataaacccattataagtatatttttaagtatttgcctttgatatacaagatgcaagttcttgggttgggaaaaatagctaccaaatgcttatgtggtaacaaatcaaatattgtacccttattaaatacaaagtggaattttctgcattgagtgattgagagaatcacatgcaagcctgtttcttacccaatttggaaattatacctggataaattgatggttggcttaaaaacaacttcttttcaagcatccatttaaaaaattaaattactgtgactctggagttactgtatttttatgacacactggtcatttctcagaacaccagatgataaattccctgcagaacaatgattagcatatcgcatggtttctccagtcactgcaaatgctctcactgtgttacactgaggggtcactcagggatgctttggcttcccagctgcccacagggtttcctgattattgcctctccaccttcatttcacccccacctccctaccccacctccccaccccacccctcccctccccaacccccatgcagcacagtgctgttcttcatcttgcatcttttgtttgtcttcagggttcaggccaataaacaaagtgacttagatcaaactttgagctcttacaggtttggatgtgttctttggtccccgaaaaagacggttgcttctggctctcttgacacctccctgctgattttactagacctttgatgctggtgaaggtagagatttttgaagatctgcctattgtggctttatgactcaagttgggtacagtaccaagcataagcctgtgcctctaaaactcaagctggcatcactgagactcagggctctgtggaatctccaaggaaagaagagaacctgattattaatacagtaatcaaaattaacttgtaaagtaggattctcagctagatttaactctaccaaaatttaggttaagtcactacctaccatactcacaagctcccagaatgttctcagagtggaaaatattctgctgaccgccatcttgctaccacttcctattctactccctaagggcttctagtctaagggactacccatcaggaagtctgtatataggtccagtatgtgggtacgtggctcactaagtactgacttagagaccctttgggaatgtagaaagaacatctccatcaagagagctcttgttggctccagcccttgttgatcgtactatcagattttctacctttttcaacagaaacgatagagacttttgggtgacattcccatttgtgttgactatttcaaataacatttcaacacccttcagcccaaaccctgtgctaaagaagccgaatgtagtcaggggacccttagcattcaagtgctgattggaactaaactgttgtaccatcaggaggcataacaaaggggttctgccgtcagggtcagtatggcattcgttcctaagagtgacagggtatgtggggtttagtggggccagtctttagccatattgctttgtaaaagctataagacaatgagtcactaaaaatatggtcaaccgcctaacctctctagatctctagctccccaaagctttatacaggcagtgttgacagtgtgtgtgtgtgtgtgtgtgtgtgtgtgcatctcaaagagaaatgctaacagataagtatgtgagtgactaacaaaatcataacagtcacacttcatactgattcatttcattataaatagcattaaaaaaaatccatacatagaaatattagaaagagccacatttaatacatctttatgaatattgaggaataccacattgtattttaagatggtaataatgttaaaggagctttgtggaaccatttttttgaacaacacaaattccaaatggtcccaacaatttacatgaccaactcataaatacccagagtggatgagtaagatatagtctatgaatatgaggggaaaaaaatcagaagaccagattaaggaaagaaagaaggcttaaatatactgggctttcttttaaaaaatgatttatttacttatttgcttaatgtgtgttggtgttttgcctgcatgtatgtctgtgtaagggtgttgggctctctggaattacagacagttgtgagctgctgtgtaggttctaggaattgaatctgactgctctggaagagcagttactactcttaaccctggagtcatctctctcgcctttgggattttcatttggctgagagaggtctaggattaagtcaaaatttctatatacttcgacaacccataaacccatccactgaagatgcctagcagccttaactatccttgtcgtctcagatttccctgctcgttgtcagtgcttacaacatacatgccaataaaatatgcgaggacaactgtttttatgtggcaagttgcaggtttttttttaatgcagttgtaaatgccctcttcatactgacaaacggcttttcatggtgtttttttcctaactaaaaattttacacacttattccagaaaaactgaaaactacagatatgtgtgaaaatattactcagtcttaccacccacagaaaactgctggtaatgtctaggtagggatttttatagtgttttctatgcaaatatattcaatgaaaaaaaaccctgtaaatatattaaaaatcttctaaatacgaatcacatatgcacagaacgatagctttgttttttcaactaatatttaccatgaacgattccctgtttgagttatctttgaaaacataacttttaatgtcttatggctgtgtaatatgaacttaaccgaggctctttagaatctttatgcagttaggcaattaaatggttttgaaatgttcactcttatcagcaataaaggaaaaatatcattgagcatgtcctgagtcatacctaatttttaattcattaattgtttcttttggtgtgcgcatgtgtagaagccagaggagaatgttgggtgtcttgctccatccctctctacctttttttttttttgagatatgccccacccaccctccactctctacccacccctaaccctggccactcctagctttttatgtgggtgctgggaagtacactcagattctcatgatcgagcagcaggtacttgtcccatctctccagccccttcattggactttttatgtttttttttatgacaaatttttttcccgtaaattagtgggtctgagtcctcgatggtagatgaatgatgatcaccttgcattgcagggtcatgtatcacagcattattataccactttcccctttcctctgacctacttttcttagacatcttaagtctagactcctccattttgctttcttttctcatttagacaccatgacaaggctgtctagccccaacattaaacagactccttgcggagtggaggtgggtgagggaaccagtcaaatgttgctcatgtgagatcagcattagctgatctccaaggcaggaccagaagagtggagtatattgccttctgatacgaagtctggaccagctgaaaacaagactcggattttactgggcagcccaactcttcagaaccctggccccagagggagaaatgggagggagcacagtgcagttggatatttggtccttaaatattgtgaatattatgtccaaacagctgttgagagtccatgtagggtccacaaggaagcgtccaaaataactgtgaggacaccaaatgccagcctttggaaagagtggtccccagggtccacaaagacaaaggggaaagagacttgtttctttagaagactagaagatgggatcgggaaacttttgtaggatttatcttttagtaactatttgtgcgtgtgtgtgtgtgcacgtgcgtgtgtgtgtgtgtgtgtgtgtgcgcgtgcgtgtgtgcgtgtgcgtgcgtgtgcgtgcgttcgtgcgtgtgtgtgtgtgtgcgcgcgtgtgtgtgcgtgcgtgcgtgtgtgtgtgtgtgtgtgtgtgtgtgtgtgtgcgtgcgtgcgtgcgtgtgtgtgtgtgtgtgtgcgtgcgtgtgtgcgtgtgcgtgcgtgtgcgtgcgttcgtgcgtgtgtgtgtgtgtgcgcgcgcgcgcgcgtgtgtgtgcgtgcgtgcgtgtgtgtgtgtgtgtgtgcgtgcgtgcgtgcgtgtgtgcgtgcgtgcgcgtgtgtgcgtgcgtgcgtgcgtgcgtgcgtgcgtgcgtgtgtgtgtgtgtgtgtgtgtgtgtgttacagagaaggacagcccttggcaaaggcataaaaccactccctattccctagatcactgccaggaatgtggattcctcagtgtcaggaaaggactccgaataggggaagatgtagacccatagcttctgctgcaataaaggttaggcttcctttaatccccaattgttttcttcacacatgaggctgctcatgtgtaagtgccatttgtgaatctattgggaagcatgttggtagatttgagtttggagtaaattttatttataatttggatattttaaaggtctcctccttatctactcttaatgctgcatctgataacctcgtttgtattccagagtaacggtcataggacagctgaggtgaagatgatagaagggttttaaaacccagggaagcagatgattcagtctgtgagacagcagcaggcagctgtaagagcagaaggagaagatgaagcagtagaagatggagcagtagaagatggagcaggagaggatggagcaggagaggatggagcaggagaggatggagcaggagaggatggagcaggagaggatggagcaggaagcaggagatcatcagctgttacgggctcaaaacaaacaaaaaaacccaacaacagcaaaaacaaaaaacaaacaaacaaatgcttcctaggtctccctaagggagttggagtgtaattcttttgttgtttttgtttgtttgtttggttggttggttgtttgtttggtttttgcaagctgaggacatatgaagtctggggtgaggctggagtgctgcacagggtgattactattgctgtgggtgacttagttacctcctgctccctctcctccccaagtgaacaattttcctctaggaaggataaataggaagaggaaggagcagcgtttcaatacagaagaccacatttcaggcttgaaatagacagtggagatggagaagaaccaaaacctttaaaaggtttgtaggcggtacctctggcctggccgtgatgttctttcaaatgagaagagaacgatgaagacaaagataaaagtgttaagcaagactgtgatttcccagagtagatgacagggtgatgatgttgttaagaaggcaaaaggggaatacttaaggtgaagatgataaatttggggttctcatttttgagggagaatgtcttcctaacttcgtgctgataaatgttaacaagtggcgttcctttttccttccttccttccttccttccttccttccttccttccttccttccctccctccctccctccctccctccctccctccctccctccctccctccctccctccctccctccctcccttctttctttctttctttctttctttctttctttctttctttctgacagggtttctctgtatagccctggcctggaactcaactttgtagaccaggctggccttgaactcagaaatcctcctgcctctgcctcccaagggctggggtcaaaggtgtgcaccaccacgcccagctaacaagtggctttcttaaggaaaacaaaaacaaagtcaaagctacaaataaaaaaggaaaatcaagtgagcaaactctgatttattatttctaataatataaatataaatcttcttaacactgacaatttcagattagccctatggatgccaattgctgagtgtgtgtgtgtgtgtgtgtgtgtgtgagagagagagagagagagagagagagagagagagagagagagagagtgagagagagagaatttggacagaacagcctgggcatttagtagagagtttaatgaaaaacaagaaagagacaattgaaactttcctgtaatgtcttgtaatgttaaagaaagggtaatttggaggaggcagattggacctgtagctttaaggaacagtatatctcactttctgcctgatgctcagaatatatctacttacaaattggaataactggttgaccataacaaaaacctgcaaatatatgtttctcaaggccaggatagaaacagtgttgtacctcgcttgggtgttaatacaatttacaatagtacagaaagaatcacattggtccactcaaaagaaatcacactgcattcagagtctacgtggtttagagcctgttccacctataaagggtggcacactgaattttctcatttgatcactgatagcttgaggatttttccccctgggtacggaattaagctgattaaaacttgaactgtaagtcttttcatctctcttcattaaaggtgatttaccaattaggggagggagatgtgtgcctgtatgtgctcatgagcatgtgcctgtgcgtgtgcgtgtgtgtgtgtgtacaggtgtgcatgcatgtatgtatgtgtgcctgtgtgtgtgtgaatgtgtatgtgtgtgtatgtacatttcaaagctagcgatcaacatcaggagtcttcaatttctcttcgctttatttatttacttattatttacttatttattacgtcacagtctctcattgatgctgctagactggctggcgagctgactccattcatctcctatctctagctcttagatgctgggattgctggtatactacacctggcttttcacatgggttctggggatgtaaactcaggatttcatgcttgcatggtaactcctttatcgattgagatctctctctagtcttctttttgaatttttgagttatatctcattctctaatgttctaagcagtaggtttttttatgatttggttgtgagcctagccgttaacagctgagccatctctccagctgctagtaggttttctcaatcactacaaatttattttgaaaaatcattttgtttatttttttttttagaaaattttcattgcctttctgtagtgtcctatttttttcagctgcagggggccaaatagtaggtatctcgggcaagaaacacgtgtagtgaatatcttttgttaaaaaaaaaaaccaacaacaaaaacttctctcttttaaggaaggtgtttgtagactgtagactggctcctagatatgcatttaaactatcctctaaacactgactttcagggaatcttgatttaaaagccttcatgggatgataaaattgagcttcttgtatctctatgacctctctagcaaggtcagtagagccatagttgcctgaaggtcaagtctgtaattagaagatcccagggtcagctcagaatagaacctcaagcaacccagggtatgtttatggaatccactacttcagagcaacagtaacaaagataggcctttccactcaggtagaaagggcttcctaggacaaggttgggggtttgggtgaaggtgttatacatcagaagacatggaagggaaagctctctggagcatgctcaggaacaaactaaccaggggtactcaaaggatggagaaattcctgctttgaaatttctttctttcttaagtgtgatatcatctaagttctaactgttgaaatccagtagttgtgtcatgaggtgctgtcctgatggcaggtcatgtcacttggtgtcaacaggtgtaacctggatgaagcatttggcctctgtaggtgtcgaagggtagagatttacaacatgcatacacatactgccaacactgcagtgtatttgtgcatttattgcagtgagagttgaataggggcagattcctaaccctacagggcttcctagttaaacactgcaagttggatttcagggtcattgccttcatatagtgaggattccaggatgctctgcccggggcttctttcttcccaccctttcttctttctctgcctcctaactacctgatttgggtagcacttacatgtcacctacgctcttttagagaaacccaagaagttagcttttatttttagggtaaaaaagagagagatttatttatgtacatgagtgttttacttatgtgcacatgtgtgcaccacgtacacacctggtgcttatggaggccagaagactgtgtcagctctcctgtaactggagttacagatggttgtaaagcagcaagtggatgctgggaacagaatttagtaggagtactcttgggaaccaaattcttcaaagtacaaaaagaatgtgtgtgtgtgtgtgtgtgtgtgtgtgtattttaggtgctaggagatatgggggaaatgagggaagctgcataaagacttaatctcctaaaatcatgcaaagaacgatcctttccccttaggcgttttcctttgtacacagatggtcacacatattattttaaattctttgccagtgctggacttttaaaagtctggcataggaaatggtttatagggtatggatgtcactagagattggcactgatgttcagtcagtaggattctggtgttggcactcttcttccgaggacttcaaaagttccaacgaaattcattttcagaaaactctgaggcagagagaacgttctctcttgagagacaggaagcaagggccaaggatgtagctctcagctggctgaatgcttgcctgctatgcaagaggctgggttccatctctccgcactgtacaaatgtgggtgtggtactctgttcctgtaattttaggccttgggaggcaagaggattaggaattcaaggttattgagtttatgagcagactacatgagactctgtctcaattaaaacaaataaaatagaggcagaaaaactttatctaactttggtcgtttgacatcatcaaaacccactcttgtgaccacagctgccccttgtggcttataggtacctattactagtggagtgtgtgtgtgtgtgtgtgtgtgtgtgtgtagaaggtgcagactaggtccctggaaggtgtgtgtgtgtgtgtgtgtgtgtgtgtgtgtgtgtgtgtgtgtgtgtagaaggtgcagactaggtccctggaaggtagagatcttctcttcaaaatcaatgtaaaggtttgaggcagacaccaaaataggctgatattcactgtccattccacatcccttcccccaatctaggacttttaaaggaagaaaaggaagagaccgaaaatggttggcatctgggggtggggtggggtggggagttttccttcccaagttgggggctgagcaaactaacaaaaggagaggggggagagtgggagtaagggagagcgggagggagagaggaagagggcatacacacacaaacaaaacaaacaaaactcaaaaagcaacacccacaaaaccccaaacaattgcagaaagaggagtttagagaacgagcttttcccctttcctcctctgccgggaatgtggagtccctggctcagcgcaagtccggagtttcccgtttcccgaaggctagcaggtcagggccagggctacagaaagcgggccccacaaagctctcaccatgcgcccccagtgcccgctgcggcggcgcactgtcgccggtttaaggggcgggccatgtctccacgtgctttctgctgagtgactgaactacataaacagaggccgggaagggggcgggggaaagagggagagaacagcgtttgaccggtagtaaccccggcgctcggcacagccgaatctataaaaggaactagtcgcggcaaaaaccagtaattccgagggcgagcgagcgggccgggaccggcagagcccacttctctccgcggcgcagcgcaaagctgggcagggggcgccgcgggacccgcgcaaccacagccggcttggggagctgctctgctccctgtttccccccacttttttcttcccctttctggaagggtttgtgcaggggtagggaaaacagactcaaacagcaaagtggaaaacaggtaagaggttcttcagtgacttgggcattttgtttcggggccaaggaagcgttgggaagctctccgttttggggacactggggggactcgaactcccatgtaccttacttctggggatgcaaatagtacaggggaggcataaacagggaaagaatgttctgggacgggccctgtcgaccctgggactcagaactgccgcactcgggtctcccggaatcggagaccagcgagagcatctccggcgtcggagactcgcctcttgggcgcagtgtgagccaaggttcccggacgtcctcggggtacagccagtggggtagggagaagggaatcctctacaaagggtctccttttgtctggcgcggggtaggccgtcgcccacaagtgtcacatctgagtcctcactccattatttaactggtttgtgttggcctctgacttggaggttctcttcccgggactgggactgcatgtccttgtttccaaagaactctagtaggaagtgtcctaaacggggtcttttatgttactgctgcttgagttctctgggctttgttcgactccggggtcctgcccacaggcttcctgcgctctggagggctgcagtccctggcgcaaagtgggagaccacttttgttccttctaaagacagaaaacttaagagagtctgcagaaacccgaaactggggtgcccaatccaccctcatcttactgctttttgctagtcttcccttggggagacttcgggctgagcaccgattgggaagctggggctaggttgtgcagccgaatgaccgcaagtaaccccatcgggcagcacagaactcgcagctcgggtgctgggccgggctccgccgccagggggtgggggctgggcggcctgcgggtggcccctggagactggcccgcagcgcctcctggccgggtagcctaggtatggcctggtgcggagtgagagtctctagtccttttgcttcactgtgaatctggtcaaaactggtgtttccaaactgggaggaaacccgaggccaagaaagccagtctatgttttcatgttgttgtttttttcttttttgtttttgttttttgtttgtttgtttgtttcctgactcccagaccgttgctcaatgaggttcttggggatgttggctgatgacaaccttgtggataggtgcctgttttggtttctgcacttacctctggaaaagagagaaatacttattaaactgtttgcttttttttttttttttgactttgtgtgtttgtttgggaaaactaagtgtcactagaaataattagtttgccccatttgctgcaatggtatcaccattccaaaacaaaacaagaatttacttcgacatccttccaaggaagtgggcagaataaatgtacaataaaggacagataaacaaaaggaacacttctggcttaagatgtaggcccccggtagagtctaccttgtacaagaccttgggttctagcaccaccaaccacagaagcaaagcaaaacaaaacagcacaaaccttccttgaagagaattggtacaccactttctttctgtggctcagccctcacctcccacagcacacacctgacacatgcctgcaggctcgaaagcacacccttacctcttagtcataattcggaaccctgacccaagtattgatactctacaagacataaatgccaattaaaaaggagttgtttatcatcaccacttttctttcagcccatttttaatattctaatgcacacataaggacaacgtattgctgttcccattgttgaaaaacacttcccccacatcaaaggaggtatagacaagcatagagaatatttgagtggatagtatatcaatatataaataataaagataaattacagtttctattgtaagcatgtcttttcctcagcgctatcacaagtcattaaaatagggcttttttttttttaaagaaaggtgtgatgcacagaattgattattatctatgtggtaacaagttgaatctgagggttgagggaaggaaattttcagcaacataatgctcatagtaccattttggagcaaaaattgctaccatagaataagtcatgggtctccttgtgaaagtcactggggttctggaggggtcactggtggtgacttgggtatttgtgacgggtgtcttcccgaagatgagtattttaaatccagccccctaaagtattttttattagcacccaaaggcaggcctgttgtggcccttggatgcatcttgatttggaatgtgtgcgtggttgatgggagaccgtgaattagtctggaattggaaagggtgactggggctgattggttttctacctctcttcatggaaaccccaatgcaaacactatttaaaaaaaaaaaaagaatgatacttagcaactcagctatgtgctaccttacctatgtggagaggagctgggacttttagtatttttttttctttaggcatcgtttttttcctctcataaatcagtgtccttatgtgggctgcatatgtagtgactgaaaatagatctttgcttttttaaaaaaaatatactttttagtttctaagatagttaaatggacacttctttaaactcttaaattagggacttcctggatttttagaaaatatatatgtgtatagctttggccgttcttaaaacattcaagtataaatatatttttatatatggtctggatgttaaataaataatgaaattataatgtaactatggtcaattattctggcattaaattttaaaagattggtcgtaatacttgttgatttacttgcattgggagaaggtccgctttaaaaatattggagacagctttacacacggaagagaaagcacctggaataccaattatagacgtgtttgtgtcttaatagacgcttacctggtgctgttcccggtgttactcagacgctgagtttatcttcaagccaaacttgtttattgtaactacaggttaagaaggcgggaggctatctggtccttggctctccattttccaagaggctgatttgagatttgaattcacttcccaaagtctctaactgtccagattaggggagacagtggtacaatttcagatgccgtgaaagggaatttgccgtgtattcatttgctgtcatttttactggaaacttatgatctgtatcatattcccatatttgctctggggtagtcggtcaaattctcttctggaagagaccttggctgcaactcggtgcaaacaaacaaacaacaacaacaaaacccaggcagtaacatttgctcagttctcatttaaaaacaaagccaaaacttggttttaaatgagtgtgatcctcttgcctcagctaattaattgtgaatagtgtgtgacctcagagtagtttgctacagattatggggccaggtggcataaagtccgagtgaacgtctcagacatgaaatggtttctgcaggcaggtcttaagctacaccatactctgtcaaacacgaatggcccaaaagcagcttgtctaggattatcgttgactgtggggaacatcacatttgtgggggttttttttttgaagatttttaaaatttattattatatgtaagtacactgtagctgtcttcagacagcccagaagagggaatcagattttattacagttgattgtgacctaccatgtagttactgggatttgaactcaggacctttggaagagcagtcagtgctcttaaccgctgagccatctctccagcccatgtttgttttctaaaacaatgagactttgcaaacttgaagacctggcagaaagaatgttaccctcctcacaagtctcctgcacccccaactccctcccattctgcacttccatgcagaatatgatctgagccccgtgctcacgtatgtcatgcacttaggtttcaaaagagaggtctttgacccttgcgcgtaatctgtctctctaatacggaaattgacaaataccagtcagctaaggggctggatgctgctcgcttcctgtgttttaaaactactccaacaaataagacattctcagcaaagtgttagagactgatacggccacggacgtcattaatgcatcttggtgcgtgtttaaatgatttaggctagatgactcaagtagacgaatagtcctgctcacccagttccatttccctttttgaggcagctgcagggatttgagacaatagtctgcgatgccccatttaaatattttgagttgttcattaatgtgctcttatggataagcgtgagataactccttatgtgatttagaggttcagacactttaagaagtacagaagcctcttctgtgttatttctggctttcacagttttggggtgtgtgccttaaaatctagagtgtttttgtgtgtcatttccaaaaacttgggggccacgcaggagtaaggaatggtaccagtctaggtgtctgtcgacaggtaaatggatgataaaggaagctcttgtcctctctgaggagctacaaacctgctaactaggccaggctctactcctgaaggtcccactacctcctgattacaacacctttaacacatgggccttgagaatacattcaagatccccagttcagcaacatttctcttgctgcctcctccaggacgcttttctttgaaagtgttagggaaactcactcccctggactcctggtagcacgttgatactgatccccagagtgactgctgttcaccctttccatccatccgtgtatgaggaagtggatgaaccgttttatatgttgggagtaggggcagtcctattgtttcttttgctgactggattatatttatttctatggcttctgggtacattaagccctggcagaattttttaaaaagccattattaaacttttaattattagatttacttattttatgttgattcatttatgccttgcatgtatgtctgtataacgtgtacctgcttggtccctgcagaggtcagaagaggaccttgcattctgtggatttggagtttatggatggttgttaccaactgtgctgtcactccagcctctttttgttttaaacatcatctattctagtctcttcataataaagaaccatgcctttgttttgtgtcccaaagccgtaagatttcttgtctaaatccactccctgagcagtcattaattggaaattaaattcttattctttttcttccttgatcctggatggcttctcttcttgcagaatacagagttataatgccctttagaatagtaaagagaaatcgtgtacattaaatagacatggaattcttaaatcctggcctgctctcatttatttgttgtctctgttggcccagtttgaattgtaaggggctttttcaactggaactcttcttgctttcccaaagacaaagtgtcctttagctttaagttcaaacaagaaggaacattttcacagaactcctggatgctaagtaagggtctgcgaggtgatgttttctttatgcaaaagtataaaattctgatactaattctggttggtgttgtgattcgcggcaggtgtatttcttttttataaacttgtgaatgatggtgttagttgtagtgggaccttgaatttagaatacagccagcctttggtcggcttgtgtttattcagttatcagtcttatggggatttgcaaatttaactggactggctgccatttctcccctttgcagtgcaggctacacttcacgtgatcagaaggcgagcggctctcccctgctgaggagagaagagtgagcagagcctgcagagcccaacaggccactctgtcctcaaacagagctccatttggggacactggctatcacctgatgtagccacttagtacagtgttgcttggagactggggtgtgcgactttttaaatggcaccataaaatctgtcttttttttttaaatgaggctaccaacgttccacccagtagatgagtccactttcccctgaatacttttcacttgctactctgagtatttgatttgtggaatcttaataacagagtcacttttaaagaaaggaatgcatagaattttgataacactggactcatctgacatgaattttctttttgcaggatcctcccaacccccaaataacggttttcttgttgtcaatactaaaaaaataaaaagtggacacacccttaagttttttgtttttcagaaccagttgtggtcttattcctctttttctcctcctctagttaggtagccagcaaagtggcttgtttgtctttttgtggagaaggtgtcagactggagggaaggactcgggcctttgggactgatggcagctgaatgacgttctcacatacctggttagttggcgcttgctgtgttgcagaactggcatgttagggacacagggcatctgcttggcctgcttccggagctggctggtgaaagggcaatctggagaagggtcctgataccagtcacctgatctctaagctggccctggacaagagctccattatgtgaaaatgaaggcagtaaattgttgaggtagaaaagctgtgtgcagatattgaaagggttccttaagtctttgacttgaacctgtgggcttagagcattgggttcctgagcagtgctgactgttttatagtttgggatgagtccccggaacccccccccccccccccccccccgaagatgtccttttcagctggtatgttcacatgagtctattgtttgctttgtaacacagctggaaatggtgccttggcttcgggtcctttaaacaacttactcagcagggtgcacttgctaagccagcaaccagggaagagtttaggtagatgggaaaagaggtgcaggatggaagcccagacttctaagatgattgatttagaagtcgaatgaaatgagacagaggcagctttaggacccaagcacaacttgttggaaagcagccgtgggctacagaaaacagctgaatgacaggacaatgtggagagaggagagaccccagaaggggattttatggtaaacccttggtatcctgaagggcttgctaccagagatacccaggtaagtttcgcttctctcagtagtctgggctcaggagagagtgccgtgctctggaaaggccatggaaggaaatggtactctctctgtagaccaagtgaggagagagattccgttaattgtctgctcactctcagccccaccctggatggaagcttcactccgtgaagtgggtaacactcatttcaataacagtgcatccagtacttctcttgttccaggaactagataaatgttttatagacactattagccctgtttgatgcagaggacgcagggcgtcagaatctttagggttccagagtcgatgaatagtctctgtgccatccataccttagcatccttcagcgatgtgagccacataccatggttgttgctaatatgccactggaccacagctcccaagatgttcttggaaagtcttcttagaacaacaggcggtattatccagtcaagtttgtctgcaaatcagggcttgcaggtagcttgcaggtagatcagggtaaaggatgctctgggcccctgccaaagtacatctttactccagcgttttgaccgcagttgaagactttttatgtttctcccttgcgacaagtcagtcatgagggtagtttggttcctacagtcagagaaggttcatttctttgtgtgcctcatccccctgaccagggaaaaagcaaatgcttgtattatttgctaaattcttcctttgaagtttgctctgtgtttgtttagtggaaatcagtgagaggtgagggggtgatcttttaacattcggttagaattttcccctaattttactctagagggacaaggatttcggttcggtacagatctgctttcagaaaagccaggcttttaagcattttaaaagaagtccagaggccatttgtgtagctgatagcaactctggaactctgagggcggtaaataggatcattgactgtctaactatcagagagagacttgatgggagtagcttttgactttcaggatctcttgtagaatagaattgtcaacaacagcaggaattgcttaagatgagcaattgcttctcaaaggctagttacagatcggcacaacattcatgcctttctcacatccgctattggttttcctttttattttttaatttcatagctcttgttttgaaaatgaagctatgcacaaagaattttgtcttggaagttggctacgtgttccaggttggggaaaaaaatgtatgcagctgtttataatctcgctgttacgaataaggatgtacgtttgatgcatttggcattttgagccctgctgcctccccagttctaattgttgggcacaatagcatccacagcttctatcgttttagttgggtggttcttagctcagcctcttcttaaacagtgacaggatcagttcatttgaggttgatttttgtcttgaagacctcttgccctctttgatgtttacacatttcagtgttaagaaatgcagtgttaagaatattatctttaggtagtgacatcatttctggggtgcctgtttgttgatttgagtaagggagcatttaagggaccactaacgaggatggctttggggtagtgagcctaagactagaggccaggaaggctaatcaagacagtcagcttagcttcaggcatggattaagctggtgggtcagctttggagaaattataggatgtctcacaatccctcccattccacagcagcctacctgtgaaatcatggatgcagtgagcctgtgccagccaggtctcctggcctttagtaacctcattaggcttctccctgaacgtgactactgatccagagacataggctccgagaggctattagagaacaggccttttctatagcaagcatactctgttgggcttacaggtttcattcttgatatttcaggaccttgcacaaccctctggggatgaggccggagcctcatctggtcttgcttttgcatcactatctcatgaatatgcaatcagttgagctcagcacctttgcatatcggctacagttggacctatttccccgctttgtagtttaactgcctcgccatttagcagtatgaaacaccgcagatacacgcagttttcaattgcccgtttttacctcccctaagaaaaggaaatctacagacagctgttattaagacatgcctccagctatggtcagaaatttcaccttgcatctggtttctgctaactgaaaatctgttgtcttaagaaagcagagcttacacatatgcatagagagacacatatatttatttattgaaagttctggagaatggctgtcatatacccattgctgtttgaaaatgagaattagttgctgggtgcacatgctaagtttctgaactattttgatggcaccgaggagagaacgcattcagaagactaagtggactcaagagagactcaaaggcatgtgactgttctcaaaaagttgcagccgggcgtggtggcacacacctttaatcccagcactcgggaggcagaggcaggcggatttctgagttcgaggccagcctggtctacagagtgagttccaggacagccagggctacacagagaaaccctgtctcgaaaaaccaaaaaaaaaaaaaaaaaaaaaagtacagctgtcatatggaacacagacttggagctcccacccctttcctgtccagaaagaccaacttctcagttctagtgagacatgacacttatgtggtctctgcttgaggacttttgctgttgggaaacaggcactgtctaaggaattgccagtcatgggttgaatgactcttctctcgtggagcctaacactggaatcatgcttgtattctttcaggaaggaacatgacaagtccacccttctgtccccaaacagcaagggtttctagtaacagtgtggccatgcacacactttgtctcctgcatctctctctctttcacacgaacacgcacacgcactctctctgtgtgtatctttggctgtcctgaagcttgtactgtagaccaggctggctttgaacttagagatcgatctgcctgcctctgccttctaagtgctgggattaaaggtgtgtgccaccactgcccggccctgtcctacatttctgtcaacagactaagtgcttccgggttgaggtagtctgaggaagacgtacttgctgaccaagggggataaattctttgactttacctttattgtgtttcttccttctgtttccagtaggtctcttgcctcttctctcatctctctttgagatacatttgtcaagttcaaaatgtcaaaatgacctggtcaggaagagagtggtaggcagagctctaagtggttagcaccatcatttcccttcccaagtttcctatgagcttctcccttcctctccctctctgtgtgtgtgtgtgtgttttcttttgctactgtcagagtctgtctgcctggctttccagtttgctttagcgatgtgtaaaaagaatgtataatgctggctggtgagcagcctatagttggcccatcttctcacttcttccttctagagatggttcattggagggaacctcctctcatgtggccatttcccatttttctctgctaaagtgagccccacccccatccctgagaataggatctatgcctctcttactctccactgagtcctaagggtctggagcatcacatcactggtgataggctcccactagatatgtgttgtggttaatgggagcctggcagagttggggatgaggatgtttggccgaattactaagtaatgatttcatattgacctactagaccccctctccgggaatcctaccataatcaggccttatagtatgcaacccttaggtttaaagcatagttgtactcttggggtatgctaggtattataatagctttagagactgtttggtgttaggtttgttgatgtatgatttacattctctaaaatttacccttctaaagtatacagttgggcttttcacagatgtacacaatggtgtaaatggtgtaactccaaccaccttcccaatattgagtcatacatgctcctctgtggacttttctcctctcacttataacctttgacgaccagtggtttggctccaagctttctcatttcattttttttcatagtgcttagtacaacttagatattatatagctgcctcctgtgtctgctctatttctctgtgcgtacagctgttgagatttgtgtgtgttgttgcatgtgtcaatgctgggtacatttttattgctcagtaatactcccagttttgtttattcacttgttgatggacattcggttgtttcagctggcttttctgaataaggtccctgtaaacatttgcatatgtctttgtgtgggcttttgctttcacttcttttgggtaaaatggggtgagacgatcagatcatttcataactgaatgtatagctttataaaaagctatcacatttttccaaagtggctcttgcgacttatgttcctgaagtcagtgtattgagtttgattatatccacagacttactcatgctttagctttaggtttaatgtgtgtgtgtaatgatatctcattgtgtttttaatttgcatttccctataagtactcgtgtgagcatgtttgcatattcaggatggttatgtttttagcagtctttcgtcttctgtggactctataaaacttccaaatgccagtggcgtttgaagtaaaaattgctaaacaaattggtggaagattagagcagtcacttcgtccagatctgtcttgcacaaatcaaggttgggatgtggaaatgactagattgataagggagactaatggtgagagtcagagaaattgctcggaggaattgaacatgaagcttggcagagagccaattccatgaccccagtggtttggggaggtctacgtggtccttggctaaacctgctgtttatgcaaagtagacttagattcacttaagcttcccaggatgcctgaggactcaccagggaagctttgcagtcctttgtgactctcttgagcttgctgtggaagcagctgaacacagggctccctccctggggacaaattgcctgaatcagttagttaatcaagcttgagaaatcagttaccacaggcccaagaatgccatcacccttgaattctgagaccctgtttttcatagctatcttttaaaaaacataattgaggccatatctcctaagtgctcccaacaagccggtattgatttatttgtttgccggagataacagagatggagggccaggaatcctgttgtcccacctcagaaggggacagaccgggtagggaaagtactgcagaaaacctgctcattcagacgttggtagagagaggtgatcaggaaggattcctgagcagccccatggaggcccaaacttgtggaggaactaggcaggctcacagatctggagaaagggttgttctgggaaaaggaacaggacagtgtagtccaaggcctaagagagagtgagtgcagcttgtccctagggggagtcctccagggcatggccaaggaggtgaaaggaggtgttccttgctgaaggcccaccagggaagttgaggaaaccttggggaggactccatccagggtggcaggaagctgttgaagggtagacaagtaccatgtgtagatatttgattttagtcaaataggggtgctcttgtgtccaagggaggagaatggggcaagcctggagccaaggaggccaatttggagttgctactctagtcacgtaggatcaagagaacggttcttgatgggtgaagtttctaaagtgggctcgcttccagccagtgtctggaaattcatgcaggggcaggagcaagcgtgttatacttcagaacattgagaaatccagcgcacagaactgcctttccccttgtgctgttggaggtttgtttgttcacttccttgggaaactgatgtggaaatgtcccattggcttttgttacctgggtagaaggtatttccaatcactttgggaggaacattgccctcagcatggatctctatgttcagagatgggggtatgggtgagaattatgcaggtgtccaggaggaggggtgggctgcaacgtcaccgtcacttgtttccgttttcacacccagagaagaacttttcctctagtctcatgacatttgtgctgtgtccctggggagcctggaatctgaaactagttgcagagactcagaaactcatcaacttctaggaaaatgtcctccaagaaaatccagtttttcgtctcatcccaagggcgctctgcagggctgcgctctcttctctcatgagcacggtgtggggctctgtctctatttgcccctgaacatctctgctcaggagtcaggaaacaattccagatatggatttggccccagagagtgaccctaaggtattcagagcttgtccttcctacttcattcaccccacccctcactttcagaaacaagaatgtcctctttagataagcagccgcgcagctgagggtgcgggtgggacctggggacctgggtttctttgttatttgcattatgcctagcactgcattctgaatttatttctatcacctcatttaatactataaaataccagacaagggagatactactgccccctgtcggaatgaggaacttgctgctcagagccgataagataaatcttgtcctaggatcacagttgggcatctgggagctagtgccttccaggcttcattctgaggctttgtttcccttttgttgcagcacattgattgtatttcagcctttcttctattttacggtgggctcggagaaaatttctgtaccctataagtcagctaagtgatttctggagagtggctttaactgaagaaaaactcggttaataattctttaatattttaagtgccacttaaaaacaattttttcacctccctgtcagtgttctgagtccagttggcatctctcaacagggaaccgctagccaaatggtactgactaggtcttcctcttgctattggcctaagtcatcttatttttgcagtaaggagctgtgggtagcctgtgccctttctggatttgctgagcaacaataaagaagactctagggtttgactaccataggatttccggtttattacatcactaataaatgagctagaattagccgctctcgggcacccattgttctggacatgttgatttttgttttctttttccttctttcctagacatttttaatcttagttctcttgtatcagggaacaaaagggtatcacagggacttaaaatcctatcaaaaacctcccacgcgttgttcaagatcatgggcttgatgggtgaagtttttggttttgtctcttagcatttcaccctgatatttcacctttgcacaacagaaggctactagacgccacagtcactgggagtcatttcatagcttcataggtttctgctgagggtttgtgactagcaaccattgcatggtcctgactttaataatccacgtgtccctcctcctcctggcacttttcaatttccccttaatccttagcttgctttagctgaagtctttggaagtttctcagcattgaataaatacagctgggtagtgggtaataaggccactgggtaaggaagacacaggctgttgtacgacctccttgtgaaaatctctcagatggtgaacggtccccccagggagacctttgagacatctgtgtaggagtgaagcggccatgtgttcaggtgtaggtagagcaagtccagaagtgtgctccatatgtcccaactgtaggagcctcctgcgttcacagatgccctgctgggatcaggccttggcaggctctctcctctgtgggatactgttttctttccacagagacacaacacaagctttgtccatatcacaagagagccaggtgtccgtggcactgctctggtgcttacgcatagtcgtctaagacagtcctcagccttccacctggggaaactgcgtcgcaaatgatgccgtttatcacttgaagggctcagctttgtctgtagcgaaatgttagagaatatcactagtcactccagggatcagggagaatttataagtgctgctgatgggtcttgggagaaaacatatattcatagggaaggcaggctggcctctcgggctcttggatggcacgtctgatctttgttttggccagggaaagttactttctcattcttaaaataatctcagtggtgctcatatgatgagaaccatcgattgcgtctgaccagctgccagcctatagccagcaagcctgccccggaagctctgtctgctggagattctgggggttggcagtccaggactcatgaccttttgacaagccaccagggtgtcagaggtgtctggtgagagggctggagcagcaactcttctccggcatagggctttgaagcagtgattgacagatctctctctctctctctctctctctctctctctctctctctctctctctctcgttttatctttcagttaatgaccagccacagagtcacagctctgtgctctggctgctccctccagggctctcgagccgcagacgcaggtcgctgtgggtgccggctgtggtgacatggcttgttggcctcagttaaggctgctgctgtggaagaatctgacatttcgaaggagacaaacagtaagctgtgggcttctctgtggggttcttgcttgcttgctccatggggcctgggctggggatcggagagggagggaagagcgtgctcttggttttcacatggtggtaattgaatgagtctggttcttgtggacacaggactgtgtggctctgatgtgaacccatgacttagcatggagggaaggtgatcagtcaggaagaagtaatagcttgggcttgcgctggtttctgggcatggtctctcacctctgcaacctggcagaaaatgaccccactccccatcactccattatctcctttcactaaattcctggtagctacttggagccacccacgagcactctctgtaggccccagtgtttttgtaaagtgaagtactgaagcaggtcttagaggtgtgcctggagatctcagcactcagccttcctcagctttgacagcagcctggactcttatagtaatgagacttgccatgtctgaggaggtctctaagccgcccacttcccatgtgggccagtctttctttgaataatccagtaggccccaccattacttggtaggtgaatgttgttttcctttggaagactgtgaaggctgtagggcaaggtgagctccctgaggcttaggccagccttccatgtggcgcctttatctgtgaccactgtgaatcttctcatcctgccctctcagtttagctacgtgtctctgaagctcacttctaaacttggttcctgtcctgcactttttgttggaccaccaacctgcatctccatttggctatcttaatgaagttcaacctgtctataatcaaaggtctttgaaagtcaaagacctttagtgaaccctgaagggagtttaactgtttctcaaagtagactagtacttggagatcttctatgcgagaacaaacatcccgaggtactcttttgttcaccgatgtttttattataaaatgacttaactatgtaagtaaaagtagatttaaaccctgatgataaaaccataggccccatacagatttataaatcaaggcaaatgaaactgaagaaagacatcgcaattcatattattaccttagttgtagtgagaaaactgactttgtttagctgaaatacaatatttcagttgccacgtgaaatatggtggtagatgatacaacggtggccattttgagtttggccagtctatattactctgtgctgatgatttagttcttcacccatgtttctacttgggcagcatcttttgataccatttgggtttccttttgtctaatcccatcaataggctggcatggtcatactttgcatacactaataaacctgaccgttgatggcttgtggcacaagttatgctaatgtaagtaaattcacataggtgtgccagaatttgttcagatgatcattgaaatggaaacacagaaagtttaaaatcttcatggagaacccaggtataatcctttgaatgttcatgtgaatacacacacacacatacacacacaaacacacacacacacacacacacacacacacacacatgagacagggcagggaaagagggagggagggacagagagagtgagagagagagagagagagagagagagattgattccagtttttcaagagtttttgattaacttttaatgttacaaatgaggaacttgaattcaaggtcactagtgagagagcaatgactagaatctatgtgtccattgtcattagtaataatgacaaaatataatgcacattgttatttataataaaagaggataattagaatgtgcttctatgagctaggcacataatgtgttatttatatatttgttttataattgctgtagataaactacagggccttgcacatgctagaccagagctctaccagtgaaccaaacagccaacaaagtgggttattgtaccagctgttcttaaaccccatgaggtagttctctttatggtacagataacagatttgatgtacagagaggttcaggagtttcccagaggtctgcattgctagcgtttggttgctgatagtctgacgccaacagttacatgttagactctgttaaacgaatagctgctgtgttagactgccatttagttattggtcttttcaagaccagtgacttagtcagggtttctattcctgcacaaacatcatgaccaagaagcaagttggggaggaaagggtttattcagcttacacttccatattgctgttcatcaccaaggaagtcaggactggaactcaagtaggtcaggaagcaggagctgatgcagaggccatggagggatattccttactggcttgcttcccctggcttgctcagcctactctcttatagaccccaagattaccagcccagagatggtcctgcccacaaggggcctttcccccttgatcactaattgagaaaatgccttacagttggatctcatggaggcatttcctcaactgaagctcctttctctgtgataactccagctgtgtcaagttgacacaaaactaggcagtacaaccaagtttcagatatcctggaactcaccatataactaaggctgcctttgaactcctgatccttctgacttccccttcctagtgccatgtgggattacaggtgtataccaccatacccagacttacatcacttttaatggtataatttttaaaaaatcaacaaattttgacatttctgacttttctcttacctacctcctgtacctcagagtcattcctaggtcctgatggtcctaagtctgttacattttcctctttatgtcagtgtcctgcctggtgggaaattgtctctgctttgatgggcgcgttcatgagtcacagaaagaaacatcactttagcaatgaaaagtgggtctcaagagagcctgctccaaataccagattttacagatggggaaactgaggcacaaggagtcgatgagactctctagatcagtcaagaagaagctgatatggggccagaggcttgagccctcctcactccggttctcaatgttggttccctttcccaatcttttgtagccacatggtagcaccaagcttgagcggaggaggaggtgctcgggtatggattcttgtgcgcagacaagaaggaggcaggagcagactgtccaggaacacaaaatgagggctagggttatctcctctgagcaggtcttcattggatttgatcttgctgcttcttgctcagtgctgtattttcattatgcttacgagtttaaaattactaggattggaaagataggcagatttagtcgaacacagcttactgaggagttcctgttgaagtggaaagtagggacacagaccttggacacaggtggcctttgtaggatacatcactgcttaccagcttgtctgagtcatctcccttcctgattgctaaagtaaatccattttgagaaatcagaaagaaacgcagttgatttccagtcacagatactttatgagcagagcaggtgctgccaagatctggcctgcctcttgtacagttgttggagctgaggctctctgatggacacaggctcaatcccgaagtaacgtcagaacctatctcctgacatccttacaggccaggcctttaaaagttgacttggctttatcctcagctactgctgagaaggtgtcactcctgtctaatcatctagttgtgtgtgtgtgtgtgttttttttttaagggatgagaacctgtgtgagcctttggcactttcttagctcacagagtaagcccattatgaagggggaagagattgaagccccttgatagccacagattttggacattcactgcatgatcccttggtcctgagagcatctgtacccatggcccagaacctaggacagaacctggtacttacaacatgtgtaacaagaatttgcctgatgagtggtgaatgtgttgctggtctgttatttgaaggtcttggagcagctaggggaattagaaagaatatgcagaagcccggagctgaggaacgccagccacaggcagcactgctcttgtgcccttgtctgtagaggactcttatggaccctcgctgtcctctcattgtgcagactcatggggtacatcaatcagagtgagttttccagtgtatctcttgggcaaagaatacattgaattgagttgcaaaagggtccaaagctcagtttgggtccaaagtaccagtcaactagtgtgtgggcagcagttatcctatgcaaacagcatttgggacaggaaagggggtggacttcaggatatcaggtcttcctctggctttggcctggatccagaggccaaggtctccatgaaacagaagtgacaacgtgaggtggccaaatggactcttttgtctttgcctttaaaggaaacagcaaattctaactcttaagtaacttaaaggactactgttgggacagtctggaatgaacgcgaaaacagttaggactcctgctttccaagtggttagagatggtcacagtgtgtgggaactccacttccctttcctgttcccaattccagggacgtgccttcctgtccttagtcctagctcagtaaccttggtcatggttctcattccagactggtcagccctgagcctcagtgttttctagagctttgatttccacttctagagatgaagaaagctagaacaagaccctgtttgctgtttcactgagataaatgtctgctgcgcattcattccttgtgggagactgtgctgggtgtgtagtgataaagcagactgtcctcagtggagcatagagtttattgagggaagacgatataacatgttatcagcacacaagtaaacataccattacaacatccagagtgtgaggagtaaactggtgaaccgtgatagtcaggctttagtaggtattcatggcattcaagcccagaaccccagaatggtagcagtggtgttagcatgctaagatcaggggcacagacctcagaggcactgtattttgggctgagagaacagaaagaagccaggtgtgttggctcactgaatgaagagtgtggctgaagatgagttggaaggatagaccatccagttaaggacagttgagtttaattttatatctgaaaggagccctttgggtaggcacagcatggctaaaaccgctcatcctctgggtcttgatagtggagtggtgggaacgccaggaagccaggaagcgtttgtcattctgtacatacactcaccccacctaatgcactgcgctccttagcattgcttgccttgaatgttctcatatttgtgaataatctttctagtgaggagttccgatgtgaggctgcacttgagtacttcaaaggtacttttatatctaccatttcattttcacagtaattctgtgcaatctgtttcgtcaacgaagaacacattattggtaagttagtaagagagatgtggggtcttctggttgtcagtctattgtggagtgatgtcagtagcatcctagagagctgtatgtgaggctgacagtgcaggtctgtaagctcaaaccctattggcaacacttagtttgcacctagtgtttgctgtttcgaatgaaatcttctgagggttttatgcatacagccatttcttactttgttgtgttggctccttagcccaggagctcaggagcaggtatactgggtcaaagtgacatgacccttgaagtgtgtgaccagatgtcctttcaaaagatagtaccagttttcacagtcattctgagggttctgaatggttttgcatcgggctgtagggtactgggagataggcctggtttataagttgtccttccctccggctttggactgatttagttttaagatttcactttgggttttgcacacatgatgaagcctgtgtcattggggacaggtcaagtcgaatctgtatcttcatatcacaccactccgtgtctgtacactttgtaagacagtaattcctttcctacttatttttgggacatttataaaactttgtccatatagggaaatattttggagtcttccattgggggatttgacaagtgttggttgctgtataacttttctcattgctgagtaattcctcaaacacctgacaagaagctgcttacagaaggagtggcttattttgactcgaagtttgaagggacagcctggcacagtgaggacagtatcagagtgggagctcgagatggctggtcacataatatctgcaccagggagctgcaggggatgaatgtctttccccctttttttttcagtttggaatcccagtccctgggggtgatgatgcccacgtttagagttgatctcttccttgctcagttaaaacttttagaaatatcctctcagatacacttaaaagtgtgccttgttaatctcctccttttttggtgggggtttcaagataaggttttaaactcgtagagattcacctgcccctgcctcccaagtgctggtatatgctactaccacccagctcctccattttccttaattcagtcaagttaacagtgggtagtaaccatagagttagttacctggtattaccggagcacacaagtcttcctttggtgaacagtgttcatcagagcagtctgatgtctggggaactggttctactgtgtttcttagattagcgaccatgctgcagacagaaagcatgtttccctccccttttccttggtgtctgttctctctgattatttgtctctgcttgatcaaactccagcatctctagctcagtgtaagaagcaatcattttgtctttcaaaccttcaatattttttgcttgctttggtttttttgttgttgttgttttttgttttttggtttttttttttttttttttttttttttttttttttttttttttttttttttttgactactgttattcagaagatcttttcccggggccaaattttattccattgatctttcagtgttctttaaacacagcccttgaaccacgccaaccttgaaataataaggataaatcttgaaggtaagatcaccgctgctgtctataggcaaggaagcgaagtgcactcgtgcagtgactggggtatggtgtattagcttctgcaaccaggagcaaaagttaaatgtgactatccatggggacatggggagtgtgtgcggctcagcaccaccctgaatgaaaacgcaaaaatggtttggtgcttaagactctcaaccctggtgacggcagagctgctgagcttggttttatgctgcatcgtttacaggaagcagcatttgttccttagaaatttacagcggcagctcacaactgagggcacggccccttccccatcctgggacttagaggtagagggcaggggtgttgctgctaaacccaacatagtttgtagtagaatcccgaacaactagctatctgccagggccaatgttgtctagctgagaagtcctcctgcgggagtgcttgttccgaatcctcaggttagaggtgaagagttaggagaaggggatgcacaatgtgctctggtgttccctagagcagccatgactttgataacaatcacttcttgaaaacaacattttctaccattgccactatatggtgagaagatacagagttggtgtagctatgaaggactttcaagagttttcagtaggagcttctaacagtacaagcaacatctttgtccctaggctgtttattcatgccttatgcttaggaaaaatggtgaggttagagacgaggagaagtctgactttgatgagtggatctgaaatagtgtgcctggagaagtcaagtttagtttctagaaggaggggatgtggcaatacctagaacgttctgagcttgggagtgggtttgatgtttagagacaaaaatagttttggaggcacagggtaaagaagcataattaaatcgaatctcccatgagctctgtgattttggtggtgtgaatattgtgtgcagagtcttcgtacatacatacatacatacatacatattagtgctcagctcagtagaagctttgaaaggtcaggagtctacacggtctacgtggtgagagaaaggggctaaaggaaattggtgaccttagtgccgaagagaagcatcccttaagctagattggctttgaatctaaactctttcacataccagttccttgggcaatttattaatcagccccagtttcctcgtatgtaaagtgagtattacagtaatgatcctaatttggatgtctgactataaaaaacatctatgaagtgtgtgtgtgtgtgtgtgtgtgtgttgtggtgtgagttgactatcatgactgtcactgttggtttacttcatatctcttttcctgatctggttacaaattctgccttcacctcctgagtggtctaaggtttcttctggtgctttgctgccagagctgtgggtaccatccgactgttctttcagtggatgaacctattctgaccacatgctgctttgtggtgctaagtgtggggctacagaggtgtcctgaacacaaggcttgctttactgggtcggatatgtgatgaggtagaaggcatgtgtctctagcatagcactgtgagaggcagcctggtgggtactgcacagatttagacattaagattggggttccaatggctcataatttttctggtcctccaatcatcatttataaaaatagtactattgcagcctttgtgagcgaactgttgggaacaagaggcacacaaatcactaagtgtctatagatgttcagtattcgctataacggctacctgtctgcagggtgttagtttatcttgtgtctgtggaacctgtagacatttttagtccatgctgcgtagggagattttatttgtttcctaccggagatgcttgtctttgtcaaatagaatttcatgtgacctctggaatcaagtacagctggctgccggtcttggctctgctctgactagtgctgtggctggccgttccttaagcagtagacttttcagtataaaatgggaagaataatggttccatgcccacaatgatgttctgaggattaatggaagtcaactgtgtaaaatgagcccagtacatatggagctctccctaaatggtagctccgatttatcctgttagttgaaatagtggcttcggagtgtcaagatgaatgacttcctgtatattctctgttcagttttatacttttcaggcttcattattctgtaattcatcacagccatgtcattatagaaagctttatttctatgtttgcttagcaatgtgtgcgagtggttttataaagatgcaggcttagaatgtattgggttctgtgtcctgtgttcttggatagtgaaagctgggtttcataaatgttgctgtaataaccaagtaatctattattgcccattagatgtatgcttatgtaaccatttttcctttgttgtgtgattgagttatttgtttacaacactttacagttatagcacttcaaatcatgtatacggcttttggggattgagttgttttcttatttagtttgctccttcggatgaattctcaggaggatgacagttgttcaaaggggtaaatgtgccttttgaatgcatattgccaaacttctttcccagaggggtcagccgatttttgtttctgtctttctgattttgaaagcttcagttcactctcttacccaatatatgcttaccgtgtcatgcttagcccttaaccatgttgcggatttgctgagaacacagtaacagaagggagagcctcatatgtaaacacagctcttgtgccacaggctgataaaggcacagcatacctggatctcagaggaagggctccagccttactggtagagaagttattttcagtgttcaggaaatccaggctgtgttctctggtagaaagtcatccccgactcctgcccctgagcagtttacagaggtgtaagggacaataaaaattgtatggtgtcatggtttgcaatccgtgcccatcaccctctcccaaaggagtagtaaatctattttctatgaaggaaaagagaagaggctgagtgttgtttgcaaacgtagaggttttgttccttctttgggattatttacagacatctttagtaagattcgtcttttcttccctggtccttgccattttctcttttaatgtgctctttgtataaactactctttatagtttgtggtagtaggggttcacgaaccgaaggaagtataaaaacttcatgtttttgttctggaacatgcatagctactatcttgtttcagttcctccctgaagatcccaaaatgagcttgatgtaaagtcataccaaagttcttagaaaattcaaagttccttatttaaactaggaaaaacaaacatggttaaaaaaacaaacaaaaaacaaaacaaaacaaaacaaaaagcccaaatgcccctaatactctaaagtaccagttacccagagagagtttacttctgatctcgtcatagaagggggaataccaagagaccatgacagatcgcaattaataagactgtactctacaatgaaatgtgtccctgttgagatagatgttaattaagagtgctatgtgggagccagtgactgaagcagatcatctcgggcttgggggagatgtgagagaggaactgtttaggtttgtgggaatgtgagcacaggaggacttcctagctcaggcagaaagaagcatggctgagtcttgaaacctgggtagaagggagccttaaagacacaggtgtggaatgggatgttacaggataccacccacaattcaatgcacttcaagtttggagagtgaagggagtcagaagtgccagaagtcagtcaattgctgaattgctctgtgggtttctcagtccagtagtagctggctaccatgttatcatttaaaattcacgatcttgtgttttattttctgttcagtgtcagctgttactggaagtggcctggcctctctttatcttcctgatcctgatctctgtacgcctgagctacccaccctacgaacaacatgagtgtgagtatctgtggaccacgcctgagtctcagtgatggctagcaaaatccagagtgaagatgctctcaactgaatctttacaaagttgctgtcttcaggagaatgccacaaatagcttgaacagaaaatctggcctttactatttttttggttagggcatgaacttgagatatttgtagtcccagttaaataatgatgatagtaatgataataatcttaacggttttttaatcatgataataaaatagccttagagtcagaaagtgacggctacaaatcaccctacagtagtgtttcaaatgccagtgtccagttccctggtgttgtccttttgcttgcattgtcttttaatctcatggttaaaaatcatggaccatgtattggaacccatactttctaaatcaagtatgcatatatgtctgtgtgggggtatatgcacatgagtaggtgcctgagaagaccagaggtgttagaacccctggagatggagttacaggtaattgtgagctatctgatatgagttctgggaacccacctcaggtcctctgcaagagtactttgtgggcttaaccactgagctaccttctcagcttttagagcatatgcagcctttgtgtacaacatctcagtttgactcctgtaacatttcattttgttctcaacaatcttgtatagtagactttgctatcctttgctctgatttcctggtagctaaattggggctcacacacctataatgacttgcccaaatttacatttctagtagaggtggaatacagttcaggctgcttgtctcgctcactcatgtgatttgaaggcagtcttgacagtgagcgctgagatacagtagtggctagaaactgacacatagtgtgtcaccatgagcaagtgattttagcttctctataaaagagagcagcaaaacctaatttgcactgttgctgtcggaatgaccattttacggtctggctgtgctcggtggatggctggagcaacagtttagaaaggcccaaagaattagcatttgtgtaggagtttttgttgggaccaaagctttctgtcccacacacttgtcttaccactcaccagctccaacaggccccttgacttagaagattgtgttctttcaagacagccctgaggccacagtcaccttttgattgcgttttttggtcaccttcccctttcttacatagcatgtaacggcaggcattgacataccagtttgctaataggcatcctatatattcaggtcacacacccagatgcctcagatacattcccttggacatggctttctgatttcgtcagaacagcggagcagaaagctaaggtgaagcctgcagatatatgtatgcctctacgctgggaacaaaggactagtatgaaattcttctctgtaaatctttgtagttcaggtcagagtcctcaaggtcctcatgagtcctctgactttttgatgtccattgcattatttgactggggtcctggacacccagtgtctaactgtccaccatggtgtttctatttgcccagaggatgggctgcagcgtccaaggaagggtctttgtttgcccaggggaaggaaaggttgaaatgtcttcaccgtctttgcctttgacctacactctcccgttcttagggctactatctctacaagttgtaagaggagaatcctgctaactcttcactgatggaggagcagcagctcgttaggcaaggggctttgtttggttttccttgaactgttaacagggagataaagagattagctgagtaaacaattcaacaggccagagtccctacagggactgcccatggggaccagatcttgtcacacccttccatgtggcctctggttggaatagggatagaagttttaaaagagtgaaaggttccccgtactgatatataatgtgaggtgcatctcagcctttgggttagttttggggagtgtctattagcatatttacttgaaaaaaaatgaagagaaactgtctttggaggaaggtgggagttgtgagatggaaagagagcattcagttccctatggacaggggtagcacattacacaacagtgcactaaacaataccacacttcacagtagtgacctacacaataccacactacacagtagtgacctacacaataccacactacacagtagtgcactatacaataccacactacacaatcgtgtactacacaattccacactacacaacagtgcactatacaataccacattacacagtagtgacctacacaataccacactacacaatagtgcattatacaataacatgctatacaatagtgcactacacaatgccacactacacagtagcgcactacacaataccacaatacacagtagtgcactacaccacagtgcacaataatgcactacacaatactacactacacaatggcacactgtacaatagtgcactacacaataccacactacacaatggcacacttcacaatggcacactacacaatggcacacttcacagtggcacactacacaatggcacactacacaataccacactacacaatggcacactacacaatggcacactacacaatgctgcactacatgatgccttagaagttctaattggacaattcatgagcatttaccttgtgctgggccctctgtaaaagtgctcggccttctaagccagcctgggctacagagtgaaactttgtctcataaaaatacaaatagaatcacaagctgctctactgataagagttcctgtgacacctcttgcacagcaatcagcattttacaggtgggaaaacaaggcgctggagatcgacttggaggttggcttggctgtgctatgcacatggcagggacagagctgtaaatctccatcggtttgtctccaaactctgcgaagatacaagcaagtcattgcctggagccatggttcttcatgctcgccagatcttcagatagccctgagcatatgacgagagccagagccaatacctttttgcctcaacacgaacaggcccttggaataacatttatcttgattcccataagcaatatttgtaaatccttgctacaaacctacccgtgcttttaaaggctctgacctcagccagacataccggttattgtttgtaagaaacgactagatgtagggaaaagggtgaggagttgcctggtggatgtggcctcattttatcgatgagtgaggaagggacaggaaaaccaagatagcttggcagttggcttctgtctcatgtgagcatgcttttgaggtgctgttagtggacccttgggctgttggaggaagtgaagctgacaaacttttgctggatgaaggcaggtacaggtggagtcttgagaagagtgaggtgatggtgaaggctaccgctggaagggagaggcatgggctgggatcctggagatgaagtttctatccccagccatgtgcatctctgagttcttcatcagcggcagtatgaaggagctatattaggtcactgtccaggtccttctgtgtctcttggagatgaggctcatggtagggattgagcaaatggcgacttgctgcttgccaagtggttggtgtccatggtctgatagaccccatttattacattcccgaggttggtatcatgaatcccaatctacagatgatgccaaatagaaccatggtcacctttacttgatgtcaaattcccacctgtcttctaggacatggggaggggctggagagatggctcagcacttaagagcactctggctgcatgctcttccggaggacctgagttcagttcccagcatccacagagtggctcacaacatctgtaacttcagtttcagcggagtttacagacctcttttggcctccatggatactaggcaggcatgcacatggtgcacatatgtgcatcaagcagaacactcacataaataacattgataagtctgggacatggtgaatgagacagacagatgtgagaggcttgtgttaaaatcacttcacaggtctaatgtcttctctgcgtttccttctcgatttcaataggccactttccgaataaagccatgccgtctgcaggaaccctcccctgggtacaggggattatctgtaatgccaacaacccctgcttccgttatccaactcccggcgaggctcccggtgttgttggaaactttaacaagtccatgtaagtaccagatcgggttttctttcccaaacttgccagttaatacttatcctttccttcttggagaggtttgcatgagaagtctgcagaatgaatgaagggggaattgccaccaggatttaagaccgtgggatttaggagtcactgtgattatgggatcgaaagctgtctactcagtcagtgctctgggagactgagcaagctccatctgatctactcactcagatctctgctgtccctttgaagtggacacttctaggagccagagccactgcgcaggaagggtctgggttctccagcagctcagagcccaaggcaggagtgtcctgtcctctgctctcaggtcattgctctgacccctgaaatgactgcagtgtctctgctgttgacttgtctttctgtccctgagtgggagctgcccgagagcatgatggtgcttccttagtgtctgtgttcctggctcagatgctgggatgctggatataaaatgctccttccagacgagatgttgaggatcccccagatgtgcaaagtcacagagttagagcagaccagggactgtaggatgtgctgctggttggagatggtgctgcggttgggacaagcagggccacattgcataaccaaaatgttaaaaacatgtcagactgttggtatacaaatgcatacgatcaattgaaaattcattactggatatgcattcctgttatatgtgttcctaatgcatccttttaataaatgaaaatgtattatgaatcgctaagcatgtcttgggataaaggcattgggcttattatggccagtagcgcacacacatacacacacacacacacacacacacacacacacacacacacacacacgcacgctcttactcgtttgtgcatctacttgtgagctccccctggaggatggagtaatagctagggagtaggggaggccaggctggggagagacagctggcctaacccaagccatttctacttcttcttattccctttgcagcgtgtctcgcctgttctcagacgctcagaggcttcttctgtacagccaaagagataccagcattaaggacatgcacaaggtcctgagaatgttacggcagatcaagcatcccaactcaagtaagcaaagcccttccactcatgcatccgggagtgaacatttccctgcccgtgtgtcccagggctcgctctctagcttgtccctgactgtggcttttcttcagtggctggatgattggtcttctctgtgggaagcattgggaacaaagctagagaagctggttgccccagacagcgactggggatgcagaccccagcaggaatggcacaggcttgctttgccattaaggccagctggagcagaaattgttgccaagggcatttttgagctacccataggatttccatggatagacagattatagatatttctgtgcctatgagagcagttagagttctaatttgatcatgggtaagtaaaagttaggcacttatttctaataggaaactcattcttcgccctcagaactagccatttggataagccagacaaggcatttgaattctgatcttgaaacagtgaaatctttacctcagatttgctaagtagctaggcagttagttcctggcatgccactgaggaagtgtctggggaacatacaatttgctgaccgagactttggctacagagattgtgacagtcccctgggcagtaagcctgccagcgcgggtgggggaagaggcagtgtttgatgttcactggaacaggcgagaacggtggtatccatagtgatgatcaagaagtgatccacaagcctccggaaagtgctgctgtctaaactgcaccagtgaggaagtactcctctcgtgatgggccaacagtgatcactgctccaggaaagtctttttacccagtttgacatttgaagagagagtagactggtctagcctttgcagaaaggcctccctcctagttcgtgaggggagcagtggtgtaaagttcccagcacccacctcgggtggcttacaactgcctgaaatgccaactccggggagtctgctggcctcttctggcctccaagggcactgcacttacatgcgcgcgcgcgcgcgcacacacacacacacacacacacacacacacacacacacacacacacacttcttaataagaggcactgtcatggtggactctgactgatgaggtgtgacttcagtgcagaggtgtggcgtactctggttcctgagtcccctgtaaggagctcgaagctgcactgtacctggctgtgtactgagatcgtttgctgctgtttcccttccctggaggactctggtcaaggccaggcatttctgtgatggagagcctctgttaggttgccatgcagcagaactgagttatttcttctaccaccaggaaactgggtagcacagacaaaaagtgccggtggtaccacgtgactttgtgaataagttaccaggtcccttagaggttatctcttgttattgaaaatgggtacagtaacagacccacccagagtcaaaccagtatttgacacgtaagtaacatttaatgaatatgagccatgattatttttctaaaagattcttttttgatctatcagttttgttttatgggtatgaatatttcgcctgcatgtttatgtgtacactgtgtgtgttcctggcgtgcatgagaccagaagagggcatgagaatccctgcaactggcgttccaggtagtgggagcttccatggaagtgttagaaatagaatctgggctctctgtaaaagcatccagtgctgtccatagccaagataggattattttcaagtctggacatctcagacaaaacattcaatgtttctgagacctaatttcctgaattaattataatagtattatattattatgcacagtataatgagatattattacatcattaatatgataattcctaaggtacaaagtctgacacagggttggcccatagtagatgctttgttaacagaagccagtgctgtcttcattgtttcatgtctgaccatctgaccttgttcttctgcttcttcatttgtggggctggcaaaatggacctggcggaatttccagttcttagtggaggctgccctagagagcagggtgcttttattgtccgagcaactggagtcctgaagtgggatggaggaaagaaagggcagggtgtgcccagccctgctgaggggagctctctcccagtgcctccttcacccttgcagctagttctgttctgtttcaacttgcttttctgtgctgagcatcaagcccaggaacttgtccaagctactcaagtacttagccactgaactacatctccaggcccagctggtctttgactttctgttatttttctttgtttatcttacaacagaaagccaggccacagttgtagaggaagcatgaaaaaaaatgctgcctccttctctaggaagtgggaactttttgctgattttgaaaaacaccccaccagtctgacttggaggctggcggtgtcatggtcgatccctgtacctcatcctctcatgaggtagctcatgttgggtgttgagagctcaagctgtcaggtagtatttgccaccgtcttgtagagaattagtctgattccgtgtccgtcaaaaatccaggatcaatttttgtgcctgtttctggagtcttatttttttccggtctgtttgtcatctactcctcttgcgcaatgcttttcctcccaacttctgcctctcggtgtgtttatgtcattccagaagtttaccagaaattacaaaagtattctagcagacaggagaaggggacttctgcctgtctgcgtgctgtatttctgtccacacgtctgagattgcaagaggcttttcaaggtcttgtcatccagttcactcatggcccattgtacaaccaactcaaactgcaggtctcgtgaatatgcagaactgcaggtgacttctcctttctctaactgtaccgctggctttttgagctaagcagactttacctatctcttctaattcatatcattaaatcccgtctatccccttagccgctcgagattctgattttactatgattcttcagctactacactctgctctctgtcacgtaggggttcagtgactctcttgctatcccagatattgatcagcatgagaacaaagtttgagattggtactggctacctactcctttggatgggactgctcaggatcttagaaagctacttgcctctgtggtcatggctggagccactgggtcctgctatgagatctatttggagactcatcttgttctttgcctctgctaatgccattggactggccacaggaactctgtaggcacaggagtctactcaagcactcttgtcttgcctcaaggtttcctgggctacgacattgctttggtcagaaactgtttaatctctgtgtggattcatgcactggcttcttgagttattcagtcttgtgccaaccctgctctcccaggtgctgagactcagggtgaggggttcttcttagagggaacctgatactgaaagtggaggtgacttccctccaaccctggcttcctgattcatgtttctagaaagatccatcttctactgtttcaataatagtccagcttcaaaaatgaagtcatggattgctcctctatcactgaagcatcctgaggggagaagcaggggtgaagccttacagatgcgcctcccccagttttcatgtcactggaactttggggtcactttattggttttcatttttctctctaagccagagtattaccaataggttgagtggtggctaagtcagtttggggagttagtgtgtgaaagcattccctctttcctaccatgcacccatgctcaaaggcagtataaacgtcagctacattctcagaaactgcagaaaaggtgacatgtctagactgtgaccctgtgacatgtaaactgatttctgacaggacacaaacgacaacctttgattctgactcacatgaaaatgtgcctgattgcttaaatggatgttgggaagatgaagttcatgaaggtattgtttcatgtggctgtggtgaaatgctggagagtagttggtcagtgcctgaggaaggttggcaaatgctggtgtaggggagacttgaagctgcgtcaagactgatttggcaacaaatttaggttcttgctctcacctttggtgaactcttgattcttcctggccctcttgcttgttagaaatttggacatgaactacatttgtggatcattaagcattcagtgaggtgctacacctacgggtttccagcagtgagcatgagcacatgggtgacacatatataagtcaaaaatgcattgctctcctcacgttccagggtgtttggcctttgacaatttgttcatgttgtctgggctgcaagtttcattgtcttgacttttgagatccggttaaacgacttgatgatgcttcatcttagagtttggcttggtccttgggtggggacacctgtgagacagtggtttgtgttacccaccaggccatagcctgttcagggcatgaagtgacggtgacggtggttgtactctgagcagccgcgtggtagcagcatggtaaccctgagagcatctttagagaatgcgcagtgaaagcaagtctagtagctgccctttcgcctcatgtaatattgtcaagcgaaagctctggacagcatcagagcaagcataggtaagtgcagaaccgcttccctcgtgtaaaacaggccccactaaatcagtcttgagtttctttcacaaaatctacctcccacaattccgctggatatgctaatctgagttcagaggaataacaagtactgcaaaggtccatattcactctcatggccctctttgaggttttccccccgcccacagtggggattagctgtgtgtttacccacatatatgtatttttaaaacctgaaaaggttaggttcttttttaaatagttgtttttgaagacagcaggcactgcctgaattccaggcactagggctggggaggatgcccccggccatcagggaggaccattcccccacagcctcctctttgtccctgtccttcggcttaccacatctgcttctctgggcccaggtcttggtgactctggccttttccccaggggtggggagaggaggagcctcaaagcagtccttcccagtggcttgtccccacagtcagaggacatggtgactggtcttttgctgttggctgtaccctcactgctggttaatgatagtcagcgaacatgctcatggctgcttcttgtgagcctgtctgctcagggatctgccttctcctagtgtctgcttctgtcccatcctccatggatgcaagttactgtgtccccagggcttcctactggcgtgaagtcgggacgtgtttctttaagctgtgtctgaggattctggcttttctagggtagaacatcctcacagtctaagacattctcttcctctccccctccacttcccccctcctttcctcctcttccccacccccacccccatcttaacagtcagctaaacccttgtctagttagtgagtcccccagaggcttacttaatctagggacaatccctccggtttgtgtgggtcctgtagaagttctgcattctttacagctgtggcatgacccgagtgctgtggctagggctatcggttctgtggtgtggctggatgccagatagctgatctcttgtgtgcatgggactcagccaagatcctagctcctagttcttagttcttagctctctgggtgtctggctctgtcccaagtgacagccacattgatacactttaagtcctgaagcccagaaggtactttagggactgcagacgactatttttctggtcctttgtgtttgggtcaggaaaggttgctggggcggttgagggatgggctgtacctgtgtgtgcctgtgctccacagcccatggaagtgacaccctccatgagagctgtgctctttcaagtcgggcactgtccaccccacatggttttctgttgcagcctatgttctcttctgcttccattagtacagactatggacagttgataacccctacccctgccccatctctggttcaggggcttttcagatgttttctctccagggtgcagatgccctctagctctgaaaacttttccgagaaagaaccagggtgaatcttgggctctggactggattatgtgtctaggttgttgaggttgagaggggaggagatccagggcagtgttgtgtatgctgagttatgtctgcttgtctctgtctctttagctaggtgttgtgttgaggcaatggcgtggctggcttggcctttccattgtggcttggacccaggttatctgtgcctttccatctgcaagccaagggttttcagttagggaaaatggccgtgccattttgcctgtctgttgatactgacaagtcctgataagacataaactccaggagccagggtggttgtggtgataaggcaaggaacttggctgaggcaggggttggagaacaggtgttgatgaacagtgaataacttttaaatatcccctgaacgtgagagtcaggatggctgggttcaagcctggcttctgtagttggtcagttatacccatgcctaaccatgtaacattcctgtgcctcactttcctcaagaggtgacaatgctagcacctccccagggatgggactcctcaaggaaatgagccaataggaacaaggccttcccataccaacctgatacacaggaagtgtgagatctcttccttccttcactgtgtttgcagttacgggaggaaggccatttctctttgtgcacatgaaattcagagaggctaagtaccttgcctgagaaaccaccattggcaacggctggcaagagtagaatttcagtctttcatactttgtcgctgttacatcctagggagagctgcccttgacacctacgaggtccccacacacagacaggctggggtgaggaggatgagagagcttctgtcagctttccttcccttttaggctacgcgtccaagcttcctgcgtagcagacactaggggacttttcccggaggcctagctctaaagaccatctcgtgactcacagctacttctcccttttgcctgaaattctgccctttgtttcatcagagcagttgctcaagttgggtttacagccccgaactctagtcttctgtcctcatacctgacacccatgtgtcatcttgttgtgagatctgatgacgcgtgtcagcatgtcattaaaattgagaagcctgtaaaaatcttcgggtgattgtaattcatgtcctgtgtgtgcttgtcaaaagttttgacttgagattttagagttttatagtttgaaacctttcatctccctgaacatttccccagacctgtcaaagcccggctgtgccccagagcctgggctgttggttgccatccagggcagaggcctggctctagccaaagcagtgccccagtgcactgttgaaatattgcttgagctaaatcaaaccaaaggtcaactttacccagacaagcatagaaaatacaattgcattcaattacagaaagccatgttagctcacaatatcaggctgctttttaaaaagcttgacttgtgaccaccagacaacagtgtcacatgtctcctgcctttcctgtatgagattcgtttaccctgtgggtggcagagagcagcttgggcatagagtttggttctccctgaaagctttgtgcttcaagcccgcccacctcagttgcacggaagtcccaaaagacagtgttcaattgactctgtctacagacaaggttggacagggtagcaacgccattttgcattaaaagatatcccccaatagtataaattcattgtacatcgtttcatgtcatataaggatttgctcacataggtatgctctgtatgtttggtcccgtgtcatataagggtgtattcacataaataggtattgtatgtttggtcctatgttatgtaagggtacattcataggtgtgcattgtattgtcctatgccataaaggacatactaaacataggtatgtatgcattgtatgtttggtcccatgtcatgtaaggccatacttacataggtttattctacatgttaaagatgctcctcacataccctctcctctcctctgctcaaccctcctttggcattattccttctgtgttcctagacaatttgcttctattttctgttctatgtatttatatgaaacctaggacccataagtgagagaaaagcatagagtatctctctttctgagactaacttaatttgattaataggattatctctgactatatgtattatctcaaaaaagccatagctttgttctctatggctgaaaagtatttctcctctttctctgtggttggaccccctagattggttctctaacttagctgttacgaacagagcttcagtgagcattgatgtgcctgtgtttgagtggaactttatatttttagtggactactgaatttggttctttgaagcagcattagtggatcagtactatccccattttattgatgagaaaactgagtctgaaaaggttgtatctgttgctcagtgctatggagttgtaacttaggttcaggtctgtgtggctcaaagttccacatctctccaccacaccatatgcccacgttgcctcacttcattgtggggaagcatggttgacatcaccagcttttgattctggagagtaacacaattcacttagttgctaacagagtggaaagaactagagttttgaaatcaaagttgctgggttgacatttgcctttggtttgttttgtgaccttgagccagatactcccttctgacatctttcctgggttggaaaaatgagaataatagcaatacctttcttggaagctggttttagagatcctggaaattgatctgtgtaatgtgcctgaggctttgcaaatatgagtcgtgtttcctgcctcaaagtgccaccacgtcctgctacgtttattaatcttagacattagaagaaatgaggcaatgtgtgcaggatgcataccgagaggtctcccctaactgcctgcaaagagtcccacctaagtccctcacttgcacggtcatcttcctttccttctcttgttccctgtttgtctgtccctgcctttctctctctgtctgtttgtctttgtgtctctgactctttctctctgtgtctctctctctctgtgtctctgtctctgtgacccagtctctgtctctgtctttctctcaggaggccagaagttgatgtcagggctctactcacctgtttagctaatttagctaccaagcatgctctagggaatcctgtgttccccccccccccccatatcccctgagctgcctcaccaacccctgttccgtgggttttccaagttcccaggaactggttgtaatccttcatcctgttgtgtctggtctcaatcagttagagacaaagtcatagcttagaaccgggtggcttaaactctcccatctcccatgcctcctgtctctgccaccttctcttggattcagtttttcctgtttctaattagtttcttcctattgttgccctttcctgcttttctccttccatcttccaagtatcccctttgctttgcatcgctcaggtgttcacaaaaggctctctacaaagtatggggggtttgtttgtttaccagctgtcttcttgttttttcctcatatgggcttcctgagttttgtttctccttaggttcagaactcatttggaccagtgttagcacctcagtattccctctcattttcctccagctatctcagccaacctgctgtctcaggccccacctgctggccagtgagagccacagccctcaatggctcctccttaccacccagactcttgctagatgactcaagctctcatcccagagggttctagcagcttccctcttgttaggaaggcatgcttatttgtttaatccattctagcttccataagaaaatacccaaggctcagtaattttacctgatagaaatggtttctaagaatcccagacgtccaagttctgttgtgggctaccgtctcctggagggctcttttgactcttaacttggtagaagagacagaagaatgagcccacccctcaaggtctttaaaaagaagatttatattgttttatgagtgtttgctttcatctatgtatatgtgtgtgtgtgtgtctcttcaatctttttaaaaagcgctttcataaaaatcgtaagctcgtctgagaggactctctctgatgactgatttcctgggaggcctccagtttcccagcattcttctcctgtcagccagtggctgccttagagcatggatctggggaaaggtgtttccttcctgctgtcatctcaattgtgactgattctcaatagcacacagggctgctctgttcttactggatgcccacaatctcttggatagcaagggccgggattatgtcatacgataccccttttgtccctgcctttgggaagcactaactaggttttttccccttttatccttagcactggtactgtgatacagtagacatttaactgatgcaccaaataatttaaacagcatacagtgtctaaagttgtacaatttctgttggtctaaagacgaggttttggcagcaaacggttcagggtgtatagccacgaatagtcaggtctcttgggaactggtcatctaattgccatgacgattttatcagcatgtattttgactatatttagtctccagtttatattttcttgtgcactgtaagccatgcttggtgttattagtgctttcggaacccagaaacttggagggcctgaaaagtgacttccaatgtccacagaagtagaacattctgtaatggaaatgtgacccaggttcattagactccaattagcacttcttctgtgctgttgagaaagccttcactgcagggcaagaaaattctccggggccccgtgaccaccatggaggtctcaaggcatgtgtgcccacagtctggctcaccctcgtccacgctcacaggttccccagggcatatccacccagctactattccttctctccagagcaccccacaaagtcttctggagacatctcacaggcccagcaccacaaaatgaaccaaagcaacagatacccgaagttgggcatgatggtgtgtttataatggcagcttgtggaggtggaagtaggagaatgaggaattggaagccgtgagactcagaaaggaactaagtaaccaaccaactaataaacaggtgtgattatttccagcccctttgtagctgaaaatattccaaagtcttgtttataagactaatcaaataggctaaatagaaccacaagactgtcatccagccccccacccccaagtctttgctcatttgaccagccagggctaggagacctcaaccccacctctactccaccctgctgctgcctagggggtccatttaagaagggtatgcaggctggggctgctggcaaggcttctttctctgcttctccttttccccatttctctcctccacccacgtctcaagctgttgatggctgtggttccttttgtatagagcacaagactgcagagaacttgaaacttaagctggggcttagagagggcactgaccgagagtaaccccagtggctgctgccagggttttcctcctctgccttcctctgttgtttccctcgccctcctccttcctcctcctcttcctcctcctctgctcctgggttccagcaggcaggtgggagagcgaacgcttccatgaccaggaagaccccccccccccccccccccagagttaggcttctctctaacttctatctgcctgtgctgtttccttagcttggctgtagtgacttgacccagatgaatagcaagaaacccaggattgtgtctcactctgtcccagcccacagatgcatctcatctgtttgctctttttagacaccagccttttattttgttttccctctctcctcccctttgccctgcttcactgtgcccaaagctccagggacatggcaggcggctggctgcctctccggccaatcaggaagctgggctccgcagatcagatactttcgtccagcaatgagagaactcctttggccctttgttgactacagctttctggcttccctgatgttcacattctaactgggaccacaccttctcatgtaaacactcccaactaaccagctctgggtcttcagtgagtgagtggtgtgtgtgtgtgtgtgtgtgtgtgtgtatgtgtctgtgtgtgtgtattgtgtgtactcgttttagagggcagacatcagtattgaatttaggatctctcactgaacaaggagctcactgatttggatacaccaactggccagcaagccttgagcctttgtccatctccccagcactgagggcatggatggttcatgacttttgaccttgatgttgggggtgaatactcagttccttgcgcttgcccagtaggtgttttattgagtgagccatcttcctagctccagtctcttgttcatactcttaatcattgcattctacatcaacttatgaatgttactatttccatattcttttaaaaacattattacactttattttgtatgtgtgtgaggtgggctgggtgtgaagggacaggacagcttgtggaagtcatcccacgtgtgtctcatggactgagattggggtgccaggcttggtggcaggtactgttcttgctaaaccttcttgttggccccaactccatttgatgtctaagaaactgaggttaagagagaacaaagaaaggggccaagtgaggttcatggtcacacaggcaggaagtgtttgagttcagcctctctgataagagtctctggtgctggatcaattggatctgtgttcctctcagaaacatggaaaagagtttttcagagaactttttccccaaccacacattccacagataataaaaaccaggtccccgtcaattcatttggttagggttaactgagtgactgtctttcccacgaagcgttctttgtcttacctagaataacttgtctgttactggtcatctacttgtgtctagtctcacagtttccagaagatatgatcctttcattgatgctctataaaattttaggtttatttatttttatttttccctgtgtctccatattcctttctcctctctctctttcttttttgcagtactggggattgaacctggggcttctacatgttagaaaaacactctacccttgacctatatccctacctgtctccccacccacatattttggtgagatgagttgttgagttgctgaagctggctttgtactgtaatcctcctgcctcagagccccagatagctgggatataacaggcctgtgctactaggcctggcttttattaatttttttcatgaagttctgaataggcacttgagtgagctttgacctttcctttaccttgtagcaggtagaaaaataaaagcaaaatagttttatctcactcagacaaatctataatacattcataaatatatgtgcccacacatgtgcacactcagacacatcttatggggccacgagtttggcatctcagtgttcttgtcaaagtcacctctctcttactatctattttgaacacagcagctcagctgatgagagaagctgtccttggacatgatcagattagaagatctgtatggagcatgtaactcggcacgggaattcccatggctggcatgtacctttctcatgtaaggctcacagtaggtccagaaaggtggatgctcttgtcatttcctttgggtttgttttcttacttatttactttttctttctggtactgggaatggaactcagaacttcatgcctgctgggtaagttcacaaaccactgagacatacccacagcctttctctcactacgttgcctggaactcatattgtggaccaaggagaccttgactttgtgatcctcctgtttcagcctcccgaatagctggggttacaagtgtggaccactgcatcaagctctgtgtcatcatctcattaactcagcttccctctgctttattcctgctgtgcttccagctgttgtttacctgatgcggcttgtcacttggggcatgaaaccaagtaggcggcttagggataccgtagccatcttgacccagtctgcttcacattcgtgtcctgattggtctgtccccttcctactgccagatgaatttacctcttcaaaattggtcatttctcaggtcatatcagctcattttacattcatgcatttgtattcatctatccatcatccatctgtgcatccatccatccatccatccacccacccacccatctatctacccatccatccatccatccacccatccatccatctacccatccatccatccatccatcattcatccatctagccatccatccatccatccatccacctacccagccatctgtccagccagccagctatccatccatctatccatccatccatccatccatccatccatccatccatccatccagtggcttcacccaagattactagctgtatcagtcatctggcttggttcattctttgcactctcctacacagctagctgcatacagaagacagaaaccagcaaggacaaagccattgtggtctgtcttcatatcacttcttttttctttcccccctttcctctcctatacctcaaatctgtgataaccaagaaaatccctagagggaagatctgtgttcttattttttcctgcacattgctctatagtgcagtaagactgccattttagtgacaattaatatattaccatttaataaacatttgtccctagccagttgctaattgctcaagtgtatgaatacgtctcttatccccaggactttaaggtatagtggcatcttatggccacacagctaatttatagcaagaaacagcattacattttgggctttatggtcctaaacttctttttgcctgcatagttttgttttgaggcttggacttcctgtgtaagcacgggtgtggaacttactccgtagcccaggctggcctctaatttgcagtttactgcctctgcctcctgactactgacattacagatatgcaccaccacatcaaacttggttagatttttttttctttttttaattctcaagacccaattcttgtccttcacagttctggttcattgtgctggggggtgtggcctgggctttgggattttttaaaattcccaagtgggcctagcagcctccaaggttaagagccatcataccacacacctttgtcttcctgtgtgtgtatgtactgcagctgtcagcggtgataggacagcagcagataatgtgtgcatatccacgtgaccagactgcaagttgtttgtagccaaggctctatggccttcctgcatcatccccacccagcatctgccacattatgttcatgcactgccaagggctgttggctgtttaaccagcttctttggtttctgtgtctcatccagaggataggcagttggtgtttgatcacatccagctgtttatctgcagcgtctgttgacataacggaagcatcatataaacatgctaagtacatttgctggtctccagagtgttgctgggtgacctaggtcctttcagagtgcagtctgggtcaaacctcccacacttctgctgccctgaaggaaggagctgttctgaagttcctacgtaggatgctgtgtactgctgtggctttgctcaggaggaatttgtgttcaactggctgatctgagtgttaggtcatagatttattctgttctatcaaggttcacagagctctcttttgatcctcatttttataggtaaggccatggaagtttaagtaggtcaaataaacttagaaatacatggatacagagcccagaatttggtttcccagtatgaggtgtgtgtgtgtgtgtgtgtgtgtgtgtgtagagcattgctcatattgaaaaaagtgctctattgaatgatctattctccacctcttcttttgagatttatgtacatacacaaacttaagtattgtgtgtttgtgtgtgtgtgtatacatacacacatacataactaatttataagcatgcctgccttttcacctcaagctttggctgaagcctctctgcctgtcttccttccttctccttaccccccaccatggggatgctgggatgttctagatgttgttgtctttgaaaagacacttgtggtcagggttcttatttcctcctgggctatagcctagagatttgatgctcttgccctccttggtctcttcctggacccactaatctcaaagatccttctgaagtctttctggtcacctcatctagcattcagtcaggtgtcattgctggagcagtaattttgtaccaggctttgttccaggtatttggaacactaagataaaagacctattctgcatttttataagttagagttgaatgcaggctatacttaagtaaaataacatttcataatatatggcttccagacccgctgtattggaaatgtggaggctgcttattaaaatggagatttgtgggtggtctaccttagaacccctggttgtaatctgaaggaatagacacccagaaactagtttttgtgtgcctcttaagtgaatcttaggtgttctgtgggtatggcaactcaaagaattgagttcagtggtagcagtgtggggtcttgtacgatggaaacaccaggcagatgacagatggctgagtgctgatttcaaggagggacattgacaggcctcagatcagctgtggcatagtatgaggaaccctaggataaaactatagatgagttgaggagaatcactgttttatcagctccgttcaaaattactgaagtttgctccatgctgaagatgcctgggtcatttgtatctattaagaatctgcttggactgtttgtctctacgaagggagacccttttagatcccaagagaaacggtttcatcagtgcacactgcagtcttgttttcagatggaacccctcttcgggtaattgatttgagtttgtaaagtttgccctctagtggtcagccacttggtcccagatgagcttggttttgtttttgttttgggggggtggtggtgttggtttgttttaatttcaaaaaagaattcgggttattagaagtttaaaggggtaaggaagaagaaagatgaaatagtcaataaaataaggcaggaaaatggttggtgtttcaggcaggcaccactcagcatctgctcagaatcctcttgctttacagatgatggggcccaaggctcagaaaggtgctaaagaaatgaaattcaagtggtactatcatacctagcctccagccagagactgacgttctgaattcttggccagtgctcttttctatttcatgccactggagtgaagccttttttcgatgtactcggagagcttattgtttaatgggagttggtacttggagagcttattgtttaatgggagtcggaatgaaagcctttagcagtcactgcatttagtaaagcaaagggtgggatttcaaacatacgtttacatatttttctcagtgtttggaggaactggactttatagttctgaaatcccaggttttgttctgaaaccaagaagagaccatgtctatttaaacacctcgatatgctcacaggactcccctgtgattcttggaagtgtggtcccaggcaggcaacatcagcaccacctgggagcttgttagacatgcagctgctgcagccagagctggcagaagcagatgctctgagactgctgtccagccggctagctgaggcaacccatcaagcgattctggttcacagaaatgttagcgagccattgcctgctgatctgggagattagcccctgtggcttgtggaaataaggcactcagtattttcagtgctagctacgtgaggcggcactgaggagtcaggagcagcagggctcatgtcacaaacctcaggtaggatggatgagatcatttaaaagggttggtttttcaattggcaacaaggaaagaccatgtgtgtaacaacaccactgtgctgttggactgtgggagcccacactgagtgtggctcaacatgtcatcagaaagcaatcttttcatgtctctgccagcgagacggagctcctgaaactcacttctcggtgtatgtaagccagaagcctgtggtcacccatccgtttaaaatgaagcaatcaatattctattctccaccttccccatagcggttgagtctttttttttttttttgagttattaactgtaaacaaacacaattttccaatagatttgaagctccaggattttctggtggacaatgaaacattctctggattcctgcagcacaatttgtcccttccaagatctactgtggacagcctgctgcaggcgaatgttggtctccagaaggtaagctactaccttcagctaaatcagtggggcctcactattaccctgttgggggccctggaaagaaagaaagaaaaaccctggcctttgaaaaagctgtgaaggaaatggtcaggcttcagaagtttagtttcatctcatttgactcgtgactctggttgtcacagacgaaccctacagtgagtggggtgtgtcacccagcatcagggccagtatgctgaaaggaagttgatttctgtgtctgtcctttggcattgtaatgactcccccctaaaggggttatattttctgttaaggtgaattaagaagctttttttttttttaaatgttgttctgaaataagagccagagacgtagattcttaaactggaatctatcacaaaagattaaatgaagcacttactgctttttaaagacagggaagctgcataaagagacttctgatcaacttttaagtgtatgtaatattagtgtttacataggctttgcatcttagggtcctagagaacttcttcgccatcatttatttttgtaccactcctgggcagagtgcatggctatatgttgttcccccgaaagctttttcttcactttattctctggcagaaaggagaattgaccccatgtacagcctttcggctctatactggcttgactttacagtaagcagaagtcatgggcggggctgatgattgaagagggctttgcttcacatggctgaaaattttccaagttagaaaaaagaaaatgtgcttactgcatgctcttatgaaactgggaaaatatgtcttgtgtttaccaattgtgtggctgggaggtgggccagaggcagcagactttcgaaatcatttcatttagcataatttccattgccccctgccaatttcatatctgttgcatgccatcagtttaaactaagaggcatccagggaaggtctttgcatggtaatttgagtttcagtgtcttaggggttcttcaccacagcatggtgacaaggacttatggcaggagcaagcttggagtgtacttgagtatctggcagtcagtgacaggcgagtggacgacatggtggcgcagattcccttcactgtttgcgaaactgcatgggagttgagaggctttggtttcgccccttgcgatgctctacaggtttctgtgaccagaatggactgcgttcagttaagctgatagaggggttggtaatattgtaataagccatccattcaacaaatactgttctagggttatagacacaggtacgagccttgtaaaccaaggcagccccatattattgcagaggtctctctctgctggacagtgagactcaggtatgaaaaagcactacttatttaaacctaggaagggtagctaggtaggagcgtatggccaaagagagtttcctggggtttgctatgaagaacaggtgaggatgacgtagaagtactttacagttgagttgatagaggcccacttttccgtattcttcttgggggcaagtaaaacaaaacactcacaattgtgatgttccttaaacatagctttatgcatttgtcaagtatctaaacctacagattcacggtataattgtttccatgaggcagcctaatttcagcgtccaatatcaatacatttctggaagagttagcataaccttcctctcatagttccaggggtttagactctgggtttccattagctgagtcatgtgttccagtcgcgttgagaaaaagacttgccttaaggatttcccggtgctattgggacaagagagtgggatgcattgagtcagcatgcagtgttggaacatggctgactgtgtccgattcatcccaaggttctttcctccatgggtgactgcagtagtgctttgcttcagctcttccaagatgtactgaggttacactccccccaaagtgtctgggagccagccttccatcctgataattttttcacagctctgtttacatccaacccttccaggtatttttgcaaggctaccaattacatttggccagtctgtgtaacggatcaaaattagaagaaattattcagcttggtgatgcggaagtttctgccctctgtggtctaccgaggaagaagctcgatgcagccgagagagtactgcgctacaacatggacatcctgaagccagttgtggtgagtgctgaaggtttgagaatgagaaatcttttcctggactgcacatcttgtttttgtagaaacttgggcctggctggaacttggtgatataatttagcccagtcatactctgggtgttctttcaaatttcagtccatttcccaagggtgacttggagaagaatgttctgggtgtggcagagtccaggctcaaggtctctggtgctggtttcaaccagaaaagatccatctttcatgtttttttaaaaaaatatatttctgaggaagagtccatttgaagaaagaccgccctccccccggccaggtttaagaaaatgtcttgaaatgattaatggggaaatggctacttattagtgtttttaaaaccagtagaagagggagattgtgttagataataaaacattgggattgggtaagaccacataaaaataattagctcaaacaatgacaaaaatgtattagaaagacatacaaaacaaaccataaccgaggaatgcaagtgagccctcgtgtattgattatcagggttggttatagaaattctgcaatagagatctgtgagttttctgagatctttgtcaaaatgactccagtagcatctgcagtagccagcactctgcttttctgtgtaccagggagagctgttgtgtcagtaggttctctgaagacatgtgttcttcattataccaagatgatgctgtaatcatgtcaaactctgtgaagctggctttcagtaagggaaccatacattcctatgcggtcctaagacggtcagtttccatcagcattccaagcctagatcatgtgggttttagaaacatctcagagtagactctctgaactgacccgggagaagttcttatacatgtttcaactctgcagctgttgtgggaagaatagggggtggccaaatgacaagcttcttctaggtgcttttgtggagtgcacacatgccaatttttgtgcccagcctaatgttttctcactcctaaagtaattcattatgtttcaggtttttaaagctaccaagtgcttgctttggtggcctgtgagtccattggttattgcctttatcactgtagtttcaagtgagatgtatttctttattggagatgtttgtagtgctctgagcaatagcactgcatagttagataagtgtactgctgccaatctctgcgcttgacgttttgtgagacacaaagggtcaaggtccttacaaatgtcgtgaaaggtgtgatatgaaattgtgtttggggactgctttgcccacttatcactataagatacagaggtaaacacttagccttcaagtttaggaaatatgagttatttaagaagagacagtaattgattctggtgcccatttatttgatttcattcccgtttaatcattgaacacctgtagtgtttacagcccaataaatcctttctcctgcagagtatctgaactgctttctttttccttttttcttttttctttttggttttttgagacagggtttctctgtatagccctggctgtcctggaactcactttgtagaccaggctggcctcgaactcagaaatctgcctgcctctgcctcccgagtgctgggattaaaggtgtgcgccaccactgcctggcagagtaccaccatggccctcatcatctgtctgttaacagctcagatttcgacttgaaaatcttcccctttgggagggtttccaacaccaaggaactatacctttaaaccagtcagccatgtgacatcccgtcctgttgtggccttgtagattagtaggttcaatttagatggcttcagtgtaccccctgcatgtctcctgggtgtagagagtggaattctgcttctgccccttcgcttctgctgggaaccgtcgctcataaagtcagaacatgggggctcttgaagacgatagtgagtgatcaggattgtgctatgtgaaaatgttttggaagctgcctctgggatgggatgtctttcaaacattctgtgatgttacttactgaattaagcagtgctttaattggaatactgggactggtgcttggtttataataagcacactttttctcttgctactctgatgaaattttaatttgtcacggtcagtgtgtgtgtgtgtgtgtgtgtgtgtgtgtgtgtatgtgacttgtgctgaatcgtgctgatggacagttaattgtgccaagaactttgaggacaacagccagatgcgtgacccaattagcatgggagaagactgttctgttaatgtgccatttctgtaacaaaaagggctcatcataagagacatgttttgaaatattttccacttgtattgttattattttaggtgtgggtatttccccatttttcagccaaaaatattgtgactttctcctggttctcctctaggtggttagggtaatagcgtctggataacatggggcagtgtggcagagttagaagaccatgatttgaggtcaatgagatctgggttcaaacattggctcagctttttatagatgtcattgacttaggaaaacaaaatcttagattctacaagcctccatttccttttattttatatagagataatatagtttatcatttattatgattatttgtttttaatatctctatgtagatatatcaagaggccggtgcatactagatgctcaacaagtagaagctgatagtttaattgacataaataataaaaattgcatgttaaaaacagttgctggtaaggcagatgtttcattttgtagttcagtgttaagaagcagaagcagaataaacaaagcaatcctggagaatatattcagtgcataatgatatttttttttgtctagatctggacataaaccccaaacaaaactcaccaactacacaccaacctccagactaactcacttgctgaacagtgctgtacgtcagaattgttctaggaaccctacttagttgaggttctcaaaaaggtgtttttccagttagtacaagggtagattgattgatggaaccctgtctgtctctaggataaatataacggaggtcatggacatgctggtaatcctgaatattcactgtgtattgttaagaccgggatgtaaaggaaaaataaaaggtggaggcagtacatttaaggacttctttccaggttctggggtgaagtgatacttgccctagatagattggggctctggtcccgtctcactgtcgtctcagtagtgtgggaatggtgtctgaatcttgaggttggaaggaaggaccacagatttgtctcatgtcagcaacaccttggatatagctcgcatgactacgcttattaggtcatcttgacctctaagaataccatctgcctaaaagggagaatcctgtctctatggaatgaagaactctcttcaaatgtcttgtgtttcatgctatgtgttcctaccacggcagaatttggttcttatattagggggcctgtggtttctggaagaccagaaacctcacagctgggctgtctgccctccaaggcgcaaatgagtaatgggcgaatggagttaccttatctggaagatctgggcttgttcttaatttctgtagacaaacactcaaaaggacatatggggcttgatattatcttctgcttggtgaccttttcttcatttgctctgtgtgtgtgtgtgtgtgtgtgtgtgtgtgtgtgtgtgtgtgtgtatgtgtacgcgcgcgcacatgtgcccgcacaggcatgcgtacatatttgtatgaaggtgggtacatgtgtatgtgtgtaggcatacatatgtgtgcatgtaggtcagaaatagatgctgggagtcattcttctgcactttattcagtgaagaagggtcggcatgacttgtctcattagacatcttgctttgggggggccctcatctctcccttccaaggctggggttacaggcaggctgccatgcccacatgatatctgtgtgggttctgggatctgacctctggttctcatgcttctgtcatgagcacttttaaccactgagccattgactcagctctgcttaggatttttaagggttcagtactttagcatgtcacacgccgaccttgcttgcagcatttatttatttattgtaggcttttgtagaggagaatttttatgtaggtttttgtagggaggaattgttgcttgtaagacttgaacatttgtggaaagtttttcatgaactggctttaccgtctagctgcttgcacggtatgcctttgtctctaagccacggtggctcttatcatttggtatgtggtgcagtgacaagctgtgacgatttactctcaggccgtgtgctcatctgtacaaactgagggataaattggtgaatatcgtagtgttttgctaacatgactgctcaactctgcccaaacacgtgtgtcttaattatactatgtttgctctggagaaatgctgtggcttttaaggtaaaggcttgtttttgttttcttctaaattatgctaataagtgtattgaactatatttagaagcaccataaacatgaaacattttaaggtatgaaacacatttaatataaaactaaatatttaacttatttttatatgttaatgcctcctttagacatgaggttaatcattccccattttaataaaaatattaaaatgttcctcaaaggaaagctttattgtcatggaaatattagactccgttgggttgggtacattccaagtgggatggccataaatatcatggaaatattagagactgattgattaggataattcttgcctgtggtacattgctgacttgttttcagtttaaagctgtttttttccctccaaattttattttttattttattttgtgcgtatgggtgttttatgtttatgtcttcatgtggaccatgcgcatgcctggtgccataaaggccagaaaagggcattggatcccctgggactggggttacccaggcttgtgagttgccatgtaggtattgggacccaaacccagcatgagaacctctggatgaacagcaagtgctctgaatcatcactcaggccttgcgttgaaagcttattaatccttaatctagggcaagaggagtgcagagctggagttatacctgctttgggaagtcattcagggaaaggtgttttttgttgtccttatgatagcatcttcatagatggtccaggtcggccttgatcttgtgatcctcatacttcacagctgaatgtcgggattatagaccactggcacaatgcacaacttaaaagaggagtcggacacgtgccagagatcattgtgtaaaatgcatttacaaagaggcacacaaaattctatttagaggcctaaacaatggatgttaataaaaatagggaatgctgctaaaagaaaacatggtttgtgcagagtctcgaggggaacaggaagagaatgagatgtttaggggaatagggtgggttggatgtactgatagaggggacattgacgggaggagcagagatgggatgtgatgctggggaagaggacgaagtctatccaggcggacttgtgtgattcatgacagagcactaaatgtcattcagaccaagggcagccatggcaggttccagtggttcgtgacttgaggaggggcatgtaagacaacacttctagggatttgcttagcttctgaggcaggattacactggcttagttcttccctctaagatgtgtctccttccctttatgcttttcttctgaaaacatctactgagatatgctaacaaatatgcatggccctgtattgattaaaataccagctcagtattcagccaagtggagacttctaggttgtcgacctttaaagcgtttcaatctttcacagcataactattaagccagtgaggagagacacaatcctctgctggaggatggggacagaatagcctttgtcatttggggccttttaggaaatactgttctgataccgtgtatacatgttacagaaaatgggtggaagtctttgagtaataaggtaagagtttgtattctatgatattacagtacttagttatgttctaaatatatcagacaatgcacggattcctgttgagctaaatacagaaggtacagtccttaactaagtatttttttcctctttactctgtgcaggaaaatacttttcttcctgtgggcaatagggacttaatttgaattcacagtcaagagaatgtttttagtcaggacaaaaacaggaattctgagctgtgccttactgagcatgttaagttcatcggcagagttttgcggagcagtgttgtggcaagctctgtcttggccgatgaggtgcgagcaggagggcacagtgagttgccggtgtggatggcattccgtgttcaagtttcacggcctcagttattcctgagctatgatgccaccaacgacatctctgtatcctgtaagatctagcaatattcaaagacatgagctgcctttaagatgtgacatgcgctctcttcttcatgtctacaaagccacccttccccctttattgtagttgtattgcattaaagagaaaattggaaaacatgtcaaacgtgtgtgtgtgtgtgtgtgtgtgtgtgtgtgtgtgtgtgtgtgtatatatatatacccagaatgacagaaacaacccctgtgggctgctgtcctcactcggccatctttactgcagattgtagtcacaaattaaaccatcatagatatcacactattacctctgtaaccctgcctgttgcccagcggcaaccccaattctggagttgcatgtttttgaacattacatgaacatatttaaacaccgtcaacagcagcacttggtatgggcttgcgtgggttcacattgtgtactcgtgtttgctgagctgcccctgtgctttctgggaagccccatggattggagatcaagcatcgtcaatgcatttgtaactggtttctattacacgatagctggtattccgctttatactaaagatgtaaaaaaatccattattctagtctttgacttaatgttttaggtcatttatagccataaatcatttgatgcacactttttacatttaaaatatacatccacattctcatttttggttgaatccattttttttaatattttgtttaaaagtcttctgagctcaagttcacaattgtattttctaatattctctccaatttgttttaaactttcctatttctttcagctctgtaatctaccaagactttatttgtaaataatgaggtaagacggaaaacctgactatctagctgagccaggagtagttctgaatagcttatctttttactgtcggtttgaagcattatattctgctgatgccaccagcaacatctttggattctgtaagatccaagttaaaaaaagaaaaaagtgcagtgaggcctggagcaaaaagtgtctggataatccaagctggagattggctgatgccgaatttgaattgtgtgcatatatcttagctctgttatgtcagtctgtgcctcgcacataagtttgtatcaactgcaggtcgccgatattgttaaagtatactgaacatctatttacaagttattttaaaactacaccttatctgtttgtgtgtggcactgccttgctgtggcacatgtgtggaggtcagaggtcacttttgtgcacatcagtcctctccttccaccatggatgtcagattcaggtcgagcacacttggcaggaggcaccttcctcatctcaccagccctgaccttcacggtgacattgactgctataccatattacacatggatggtttagccaataagaggctaagaccccaatacctcagttaagccaacagacttagacttttgaccatcaaatcatcgcataagacattgcttatcaaagctcccgtattcatagtagaggtccttgtgcttgcataaaaggctagttacactcaaaggggtgcaaggttcataccagcagtttttgaattgtagaaaaacaaggagaataagcttactctaaactgtctaaattaaaaaccaaattgagggctggtcactacttaggaagatgcaaattttttcagatggagaagctatataggacggagtgctcactatattaacagggtagactatctcaggcatttggtgtcttgtagacctgcctggcacagggcaaggcacagaggcaggatggttgtcctcctgagcactgggaggctacttttaaggaagggaagaaatgggagatgaaagtgtttttcctcctgaaacttaccgagtggcagactctgctcaaagcacttggtaggcatcttgcagtcagtgtttatgaaactctgtgatgcactgagcactgccgctctgcagtggaatagctgaggttatggaggtacggagtgggggtggcagtggcggctgggggggtgggaggagttgtcttgccttgggttctgtaggcttcaaaagagaaatgcatccacctacatttctgactccggaaattttgttttgtccttatttatttttgatttataatcttgaatcataaattaattcaaaatcaatagtggtgggccatgctaaacacaaaactagtttacctcctgcccttctaattgggacctcttcgttggtgagcatttccctgactgagggaaatcaccggttcagcttctgctgtgccgtgctgatcgatcttcagttaagtagtgaactgggagagagaaagtgagagctgagcaccccactgtttctgctcctgagtctcctctggaaggaacagcctttgtagtgatctgtgagttatatcacaggcctccccaagtatagcatctatgggttgaccataggtccctcagaggaatgtgagtgtggaagctctggaatttggctcttactcacaggctttcccaggagaagccatgtgtccagcagctctagttctctcctaagcagatgtccttagaaatgtgcatacaggactgcgccagccactgagaccgtgatgttcataactcaatattctgcatttggaactcactttaaagaacacatcccactcaggatgatattttctagttccatccatttgcctcagaattccatgagttcatcgtttttaatagctgagtagtactccattgtgtaaatgtaccacattttctttatccatccctgtgttgagggacatctgggttctttccagcttctggctattataaataaggctgctatgaacatagtggagcatgtgtccttgttatatgttggagaatattttgggtatatgctcaggagtggtataactgggtcctcaggtactatgtccagttttctgaggaaccaccagactgatttccagagtggttgtactagcttgctatcccaccagcaatggagtagtgctcttctttctccacatctttgccagcatctgctgttacatgagtttttgatcttggccattctgactggtgtgaggtagaatctcagagttgctttgatttgcattaacccaatcacaaaagaacacacatggtatacactcactgatacatggatattagcccaaaagctcggaacacccaaggtacaattcacagaccacatgatgctcaagaaggaaaaccaaagtgcaggtgctttggtccttcttagaaagggaaacaaaatactcatgggagcaaatatgaagacaaagtgtggagcagatactgaaggaaaggccatccagagactgccccacctggggattcatcccatatacagtcaccaatcccagacgctattgtggatgccaagaaatgcttgctgaatggaccctgatatagctgtctcctgagaggccctgccagagccttacaaatacagaggcagaagctcacagccagctattggactgagtatgtggtcctcaatggaggagttagagaatggactgaaggagctgaaggggttttcaaccccacaggaagaacaacaatatcaatcaaccagaccccccagagctcccagggactaaaccaccaaccaaagagtacacatggctccagctgcatatgtagcagatgatggccttgtcagtcatcaatggaagaagaggtccttggtcctatgaaggctcgatagatgcgccagtgtaggggaatcaagggcggggaggtgggagtgggtgggtgggtggaggaacacccacataaaagcagggggaggggggaggagctagggggtttctgggataggggaaaccgggaaaggggataacatttgaaatgcaaataaagaaaatatccaataataataaaaaagaacatacaaatagaaaacatctccgaggctgttccttatgttagtcctgttcacttttagcactctctgttccagtctcgcagcaatctttgacatgataattgctgtcaaaacggtctaaaattctcaaggtattagataaactactgaataaaacaaaacagaacctgtgaaaacactaggaaaagctgcctttcccctggagactttcttccttatccttcctaattgtgggactgaagttgaaattccttctacagcaattctggttacacagcctgtggggttttgtctcagctgccccccgccccgactttctattgtaatttatctttcctttgggtctaattaattattttctcttgtttactgtgcagctaggttatgtattatgttaattagtatatacaaggtgatgactaacactagacataaaaacagtgttctatgttacatctccagtatttaaaaatggtgaaaatctactgactcaacagaacaaaaggagaattgttctcttgctttggttattattgaattttgtcttttcctactttattgattgactgattgattgtgaaccatcacacactcttttctcaggccatgcctataaacaaatgtcttgtagaactgtagatagatagagttgggactttcaggttagaattttattgaacacacgtgcacacacgtgcatggacacacacacacacacacacacacacacacacacacacaagcctgtgcctacttgtgtgtaccacataagatacttgtatatgttgtctattcactagcctttgaatttgcactcctgaaaccatcatgaagaagaaatccttatctgaagaaaagaaacacacagacatgcagttagagtaattatccagtgttctttattttggctagaagtttcttaaatttaatctttattaggaattgttttgatttatttattttctatgtagagattttaagcctgcatttgagctcatacactaagatttttttctccttctctctagacaaaactaaattccacatctcatctcccgacccagcatctggctgaagccaccacagtgttgcttgacagcttggggggcctggcccaagaggtaagtggtatttttttaagccacagtggacagactaatcactgtcatttctttagttctgagttctgacaacagggtccttgtactttgaatatcacctgctgcgtcaaactaaattttagaagcacaagtaatttaaaaatgaatcaggtttgatctccattggagaggaagaaactaaaatacatcaatgttgcagagataattagtgcctcagaaccccatgtttagtctagacctttctctgtgagctccttctgcccctgtgtacatttgtgaagagaactgtctctcgatctacctcctaccctgtgcactgactctgtttgacagcagcttcttcatgttgcttcttcaacagcaaggccaccattcagccattgcatcagaattcacctctgctagccaacaggaacgctgtggctttcctcgccctgctttttgccttgggaaatctggtctctgaggctcagcattgggaattcggttcctagtgagtgctgagctgatttggccgttaggtctacatgttgtcccatgtgacagagtgaaccttgatcacagttcaccttgcctgtggatcccaccactgtctgtcccattggccatgggtagaactcaaggcaggctacagtgctcaggacactggaatacaggaatccatggggggaaagtttctcagacttggcccatcctgattttttaactgagtctttagctcattttccatgcttgtatcatcttttttcccttctgaatatcaaaaaagttaccttgtttcctgacaataaaagtatttcacgttcatcagtgaacaagcagtgcacctggaaagtttagaaaatcctgagaccaagcacaacacctcctccctcccaccctccctccctctctccctcccttccttccttccttccttccatttattgtaactctgctcagccatctttgacagaggggctttgctctcatactcctccccttaggagccgactttgtcagcctgttattggttcctctgttagggagggtgagtgacctttggataggccaagaaactggaccagttggggttctgccaaagggcagaaagagaaagtccatctgtttccataaggccttgtgcgttgacagtgctctggagagtcccctccttgtctcattttctgctgctcattcctggagaaagccaagtgggtgtagtagtggccgggtggttgagtggtggggtagtacctgtaaattcagggtttgtggcagcaagtttctcttctatcattgtacctgcttttattctgggctaaaacaaaataattgcaaagcccttgatgtgccctgtggctgaatgggtggaaacctctagcagtgtactgtgtacatttttcttaactgtctcttggaacctgcttactcctgttcccacatcagtggtgggcaaccacttctcccaataggtcaccctcaagccgctttggtcatgtctctctcagtgctttctctgagtaacaataaagaaatgcatttttagaaaggtccatgtttagaaagaaacttagttgctatgttcaaaggctaactgttgacaggaaaacacaagatatcatagatggattgtggctgtttgatttcatatgactggctcatcctcagggtccagtgaagcaccttttattgtgcccatttcacagatggcactggggcacagaaaagtctttgcccacagtcttgtagagagttaattggtcgcatggtcaggtgcttggccttgccagctattccagctctgcagtgagcacagtcacctcgccaccatcatttagcccacggaagggtggaagtcagaaataaaccagtccagctgatgatgtgaccgcaggcatctgtgcagtgaagaaaaaataaaccatgtaagggatgtagaaagagggatgagatgccattttaaaagagcagagtgagttgactccaaagacagtggtgctctattcctagagaagttaggacactgcacaggaagggcagcagataccagtcacaggaaccgtgtgcttgagagcgtacacttaaggtccatgaaggaagccagaggagttaaaagagggtgtttagtgtggcttcatgtttgcaaatgactacactcttgctgttggactgaggaagaggctggatcgagaataaggagggtgggggcattgcaacaaatggagactgcatggccctggtccatttgcttaccttcagtgcaaccactcttcttggcctggaagatgaatggttaccctcccctgtgagccaagggcaagtcacagagaatgtgtccagtgagagctatgatgaaggagagtgggcaggaattctctcctcaagcaggtgctagggggagccaccagatgggaatagcaagggataataagatactgcaggtcccagcaccacaggtggagggaagaaggccttggctaatcaccagagggctttaaggtgatgctagctagacacagtatgttctgcaacactgcttttaggttaagagaataaagtgtttgcttctctcttgtcccatcctttgcttgtccctttgtcccctctcctttctctttccaccctgacaccagctgttcagcacaaagagctggagcgacatgcggcaggaggtgatgtttctgaccaacgtgaacagctccagctcctccacccagatctaccaggcagtgtcccgcatcgtgtgtggtcacccagagggtgggggcctgaagatcaagtccctcaactggtacgaggataacaactacaaagccctctttggagggaataacaccgaggaagacgtggacaccttctatgacaattctacaagtgagttgactatgcagaccaaagccatgtcctcattccgatcaatctcaggtctggctcagcctgtgtcaccccgtccctgtgtcctcattccgagctcaggtctggctcagcctgtgtcactcagaccccatgctttcctttattctgtgtagtagcaaaggttgtcctctctgtttgctcttatgacattgctcctcaagtacagagtccttgataagtgaatctctctcagttctgtgaatggaggggcctgatctctctcaggtgtttagtaacaatacccaaaagatgaataagtgattgatagctagtctttccagttcttttcatatgtgggctctaaaagaaaaaaaaagctacacaaagcagggaagaaaagaggttgctgggggcagtagagggatgagatgagatgtgttggttagaatgcaaagttcacttgtgcaaaaatgcataccgctggagagcaaatggataaggtagcaagggtgtggtaacactgtgttatatctgtaagctttgtaaggaagttcatattgatgttactgcacagactcagtgggcatctacatgaagtgatggagatattaactagcttgactgggttgtgttaatcacatcatagcggatacgtgtatcggaacatcagtctgtataaaatacgtatcatttttgttgttcattaatacctgagtaaagccagaaaacctcctaaaaatgatgagatattttaattttatattattttaattattacatttaattatcataattgttataaattagcatattattataaaagagaataattataaaatagtataatcattataattatcactataattattattatattactgtgaggcaagctttacaataaacatctaaaagggggtaatggtaataatagcaattacaacagctacaggaaaacctaacattaaagcaaaatttcctatgcataatgcattctgtttaaattacctatttgattcttacagaaaccctgcaaggaaggttctggaacctcaaatttcataggcccagaggttaagtgtcttggttaaagttgcatttctaggtaatccccaagagctgggattcaagtctaagtcctcttggctttttgaggtgaactacctcattaatggtggcatgcttgcactgtcacactcacacattcagctgcctgtttgttttgcattctgggtgttaaagagacctgtaactctatatctagtcaccaccctcgggcagttttctgtggaagtgtgtctgtcctgcacctggtcatatgtagcatttgtccagcgctacaggtctaacaatggcatctttgccttgaatacaccacaaagctaagccattcctgatttccaaccgcaggcaagaagtgagacagcttcatgtgtggctgtaacacagcctgtgccctctggggctcagcactctagcactttacaagttgctttagaagcctgaagaagatggtaatgtaggcagttttatgaaaccagctcttcttccccagcctgcagatcaatccaaggacatctcttgcttatacaacagatataattgagggcttgtttccttaggaaaatattccagccttggagataggacacaacgatagagtgcttgcatacccctagtgaggccatgggtcatttctagtatgccccacccccaactcattaccttttttatcattattttatcacctgtgtatcaagcagctcagagacgttgtgtggtatccaagcaaagcccgttctgtcctcttgaactttggatatttcagtttttaatttttgttaaatataaacattagttgtggtaggatctattaattactaaggacagacttggctttttcctcttcaaacaaaagtgtaaatgcagtcttccagcttccccaggaagaatcctgcttgtgtccagtgaaaagcactgtgagggctggcatgagggtgtggagctagagttgggatggcatgtgtagtcaaaagcttccttcagatcagctcagatgtgagtctgagagaggcctgattctttcgagcactgaggaaagacctcactggaaataccccatctaattctcatcacagctctgacaagtggatgttacgaactttccaactttcattctatagcagcgcaaactgaggctcacataaggaggttatccgctgcatgactgataggtgatgtgggagggggatttgcaccctggactggctgcatggctcccaaaccttctaagttcctgttggcaactgaccatgatatagacgtgaatgtctgtcctccgtcttctttgtagctccttattgcaatgatttgatgaagaacttggagtctagtcctctttctcgaattatttggaaggcactcaagccactgcttgttggaaagattctctatacacctgacacaccagctacaaggcaggtcatggctgaggtaagctgtccaggcttaggactccgtccccaaaatctccccagaattaggggtaggaagtgaacgcagcttcaggtagtgtatgttgaatatactcttggccatgatggggcttttaaatagtcaaaaacaaaacaaaacaaatccacatgtaatcttgggctccatatccccagccttgagtatttgaactatgtctgtagcaggggtttcttgaggaagggaaggactgagcagaggtttctgtaatgagtggtgttttttagggaatcttggaatgttcattgcctctgcctctcttctatttgtatgaatcccgattccctacctgactgtaggtgaacaagacctttcaggagttggctgtgttccatgacctggagggcatgtgggaagaactcagcccccaaatttggaccttcatggagaacagccaagagatggaccttgtccgggtgagtgactctcttctcggatttgcttgcttgatctagaaaagatttctggacatcttcccagaaatccctgagatcacagttctgtaagttaaagcaactgagatcagctgaagccacacagccaccacttctgtagaagcaaaggccttagtgcagtgatagccctgggaatgccagcatcgctgtccatcatggtccagtagcagttttgcacaaaacccagtgaggatcagaaattggagtcttgcaaagaaatggcacaaaacccagggaagatcagaaattggtgcttgcaggacactagagtattttcatttggtctccagtcactaagataggcacagtatcttctttagcctgccatgtctcagaaggaggtttgggaacagaagcgtgatctggcatgcggacaggtcagggatactggttctccaggcacagagagagtacagcatcgcagccactgctgtggaggggaggaaattgcccttaacatatagggggcacttgaaagggaagcatgctccagacacaaccaggttcaaagagagagagagagagagagcagtctggaatgcagtgtctgtcgcctttgcatcaacagaaaagccatttaaccacttcctctgggcctcagtctcagtcaggatcattagacaaagtcttattgccatggcgaggaagtccacttccttttatttcttctgccattaagaagcaagggaggatttttgccaggttactggaattgaatctctgtgccctgagggttgctgggtttttagaggctgcacttctttgggagtttaggggtgctctaggtcctcttgggggacaggttactgatcaaagagcatctggagatgaaggaaccagagcctcctttgatacagccgtgctgttacacctgtgcagaatgcttaacttggagccttggtacacacgggacgtgagtgagaaaaccaagagcaacagtcttatgcattcacggcgagtcttatgcattcacggcgagtcgtggcgcaagttggcactggcggtgcattgtgtgcacgctactctttcttttctgagggattcgtgggatgctctcacaggacacactgcagtgtggaccctaggcctgctttccttgccatccatattatctacctcttgggattgttctgtgtttgacagtaaagggattttgaattgggcatatgtagatatttccttacacttttttttaaattaggtattttcttcatttacatttccaatgctaccctgatagtcccccactcccacttcttggccccggcgttcccctgtactgaggcatataaagtttgcaagaccaatgagcctctctttccactattggccgactaggccatcttttgctacatatgcagctagagacacgagctccgggggggtcactggttagttcataatgttgttccacctataaggttgcagacccctttagctccttgggtactttctctagctcctccattgggggccctgtgatccatccaatagctgactgtgagcatccacttctgtgtttgctaggccctggcatagtctcacaagagacagctatatcagggtcctttcagcaaaatcttgctagtgtgtgcaatggtgtcagcgtttggggactgattatgggatggatcctcgggtatggcagtttctagatagtccatccttttgtctcagctccaatctttgtctctgtaactccttccatgggtgttttgttcccaattctaagaaggagcaaaatgtctacactttcgtcttcgttcttcttgagtttcatgtgttttgcaaattgtatcttgtatcttgagtattccaagtttctgggctaatatccacttatcagtgagtacatatcatgtatgtactcactttttaaaaacacacttttttaaaaacaacatcaacaacaacaaaacaaaaagcagtgtctcgcggtgtagttcagacttgtctgcaactcactatatgccccagatgacctcaaattcatggccatcctcctgcttcagcttcccccagagctggaattccagataccaaccactgtgcctgggcttccctgttcttagatcaagggtttactttggaggctgcagttgttcatcgggtcttggttcttaagggacaagtccttacaaacatgtggtggcgttcactagggatgcatatgtaggggaatcttgagagtgtaacagaagtgaagtagcctggaaggaaaggcctgggaggctgtaaggatccttatatttagagggggagagcagatggttttaagcaagtggagatgttgatgcggtattctagaagaaagatgggtgcaaggctgagacggacctcaacagagattgaataggtgagtggcaagggctgagtgcagaagaggaggcgtggcagcagcttaaggtagacaggcaagaagaggatggtacaggagagccctgacttttacctggacaggcagggggtagcgagagaccaacagaatgatggctcctggggtctgttatacagaggctgattggcatggggttaatggtaaggaattgccaccctgtcagtggaaactagggaatctctatcctagcatcatacagcaacaattttaaagaagtcatcatgggagagaaagcgttattactgaaataactgttattgcaagtaatttggaatagactagatggtatacagtaaaggagtagttaatgaaattgtaggagatacactctgtaaaatcatcatgttatcattaaaataacagaaagccacggggttggggggaacttgcaaggttagtgaaaagaagactgatgaaggaagtcatagggttttggagatcttgctcagtagagcaaggacctccccctcccactaggaactggaaaaggagcatagcagctgtgtttccattttgcccagtcagcagtggcctcattttcctggcagtgcatcagtgtagacttttgccccagtccccctgggcaggctggttgaggaccagaatagcttacctttccacattgacaggtgatggcaggtcttcttttcttcatcatgatcccatgtcctggagttaggaaagacgatcttttatttgtattaaccaggagtattacttccttgaactaagcattaaaagtggactcagtctagagacaaggttttaatttgacatcaccagaccctatctcaaaagagagggtggtacaatgcaatgtgtattatgctgccgaaagctccttagctaccttaatatccccgaagttccattttcctgtttgtgaggtggacagtaccaaagtcacacccttggagcgttgtgtcagttctgatgcctatagatccctcagcaccctactgtcactgttgttagagttaaaacaattaacctgggctgtctggtacagtgggaaacctgtgaacttcgaagtcagaggtctgactttgtgtctcagcttatcacttagccttggccaacatcagccatgagaaacttcaatctttgtcagatgtgctctttaccatgacacttgatgatcactgttcgcatgttcttcctggaatggcagacgctgttagacagcagaggcaatgaccagttttgggaacagaagttggatggattagattggactgcccaagacatcatggcgtttctggccaagaacccagaagatgttcagtccccaaatggctctgtgtatacctggagagaagctttcaatgagaccaaccaggcaatccagacgatatctcgattcatggaggtaagggtctgctgtacacaccctttagcaaaggctagaggctttttccctttgagctgttgcaataaagatgcaggcagaaggagagcttagaatgaatgtgcagtgtcatgtacagctgtatcctgcaggcctggtgagcaagataaacaccagatgaatagcctaacgagcacataagcttacttctagatttgcttcagattgactccagcgtttctgtcctttatcttctagcttttcctgttttgaaattctagatcctaatgataataaactgctttgttataaaggcattatttatgaaacttatctaatctaatttgggactgataaaacttttaaatctttaatcctaaaaaatgatggaaaggaaaaaagctgactagattttttttcttatctgatttttagttgcttagttgctgtgactcgacactgctaagacatgttgctaagagaatagaaattgctaagagaataattccctcgcacaaagcaatacaagtaactttgagtatttcactcaaacctcagttctgaaacctggaaaactactttagagatggataggccgtgcagattaagaattctggcagctagttcctgcctctcaaaggaggctgagttctggctactgcttgtctttctggtctccagtgttctaatgaggcttccttctgtctgtcagtgtgtcaacctgaacaagctggaacccattccgacagaagtcaggctcatcaacaagtccatggagctgctggacgagaggaagttctgggctggcatcgtgttcacaggcatcactccagatagtgtggagctgccccatcatgtaaagtacaagatccggatggacattgacaacgtggagagaactaataagatcaaggatgggtaagatgaaacccggtctcgcaaagctccagaatgtaacttgggtgacttttatgactggtggtactttattaaggaatgtcaacaacaaagcagccgtggcacaacttcagtaaagttccattgccggggactgttattccaaggctataaattattactctttcctttttcacatttctgtttaaaagactaaaggacttaaaagtcaggaaaaagaaaggaaagccactaggagtcttcttgctagccatacgtattttcacaagaagaggcaaataactgataagtaagttgcagtatgttcatcaggtgcaatattattcaccagtaaagggaaaagaaaaatatacccagaaggagtgttttcattgattatttctatccaagaatttatgtacttgtcagctgtgataagaatgggagatagaaaaataggaggagtggcctaggaggtgtaggggaaccttgggtaattggattttttcggggtgtgttttgtatgagtgtttcatcacctgatgtttgatttcaggtactgggaccctggtcctcgggctgacccttttgaagatatgcgctatgtctggggcggcttcgcctacttgcaggatgtggtggaacaggccatcatcagagtgctgacgggatctgagaagaaaacgggtgtctacgtgcaacagatgccctacccctgttatgttgatgacatgtgagtgtaccaacaagccaacatctcccttagataaccaggtccttggagagagtgcgtgtatgtgcgtgtttttcactggttgagagcgaaagcaagtcaataggacatcctagagatactgacctttagcggaagaccaagttggattctgcccccgccctttgtgtttagtacttagtagagtaacttatatttatcttaatattaccctatccatttcctagctattaaagagagcccctgaaaaaattttgcacggccataccctcgaaacccaggtttcatctctgtccactgctaatgaaacctttggtcatttgagagttcagtgggcctttcataagcgaccctgatgaggtttgtcctccagtgtgcaaggccttggatcggtgccgggctcacacttttcatttttcccatgccttttctctgtgcctccagttttctgcgggtcatgagccggtcaatgcccctcttcatgactctagcctggatctactctgtcgctgtgatcatcaagagcattgtgtatgagaaggaggctcggctgaaggagaccatgcggatcatgggtctggacaatggcatcctctggtttagctggtttgttagcagcctcatccctctgcttgtgagcgctggcctgctggtggtcatcttgaaggtgaggtggactcactcactcttcttgacaaggaactcttgagtggcctgataacatagcgaagggggtaaagggatctctgtgtcctgtgtgcttccctccattctgaattgaggaaagccagagaggggtaaggacttgctccagtcagcccactgggatagttagcagctaagtagctagaacccagggctccttcacaaatttacatgcaccacactggtactgggtgggggttatttccaagattgtaaatgcaacaaccagaaagtcagatgctattaaaggtttggctctctggaggaagaggctgaggcatattttggaatatggatatttattagggattagtatgatgggtggagcgctgggtcatgcagagggagaagttgagccatgattcaacagcccagtgggatgttctggagaacatacagcttgtccaagaatttccctcatagtcactggacgggggctcatgggactcaccagggaaagggtgttccagggcctgttggctctcctagctatgacaacagaggtcctaacatctggatgtcttttacctatagtcaagtaagcccccctcttcccctgcttgccttaaagttgagtctgggcagtgaggtttttgcctcatacacaaatctgctcttaagcgtttttgcttcaatagttacttcatacaaagatgcatcttataaaagttagtgttttctaagaaagcaagagagcaaagcaggagaatctaacatttgtcctaatagcagctactatatattacatatgagcgctcactgatgccaggcaccggtcagaggacatgctgtgaactccgtcagcggagccttcctacaataacccattgagtgctcagggaaagtcagagcctcactaaaatacccagggacggcagaatcaagatttattggcatgttgttctgaaacaaactcttttctcatgctctggtatccgagggcaaggacctaagccttgtgacaagggtagggatcctgtggccagtgtgtgggaacggactaagtcagccgggtgttgacagggcctggttcagtgtccacagtgactaccgatgagctcagagctcagaacttgggatgagaggatgaatccacagaacttgggatgaatgaagactctgtgtttaccaggggaaagttcaggttgcctggcctttttcctaggcttttggagagaaaggatgcgtaggctgttgtctcacacgacttttttcttagaggcaatagttgtccttagacaaggagaagccaaattccttgctctctgtgagagacggagaacaaaattatccactaagatcaagtcgaaagtcctggactttgtccttaaccataattctgccgtgatttttcatgcatagtctctccagtaagttatttcacatgggcttcatgtcctcatcagaaagtcaagcacaagggtttccctgcgttagctctgaaagaattatatgtcaaaaccagcattaagatcacgtatgtgagccgccgggcttgccaaggctacacgtttatccagactcttcctctccagttaggaaacctgctgccctatagtgaccccagcgtggtgttcgtcttcctgtctgtgtttgccatggtgaccatcctacagtgcttcctcattagcacgctcttctcccgtgccaacctggcagcagcctgtgggggcatcatctacttcacgctgtacctgccctatgtgctgtgcgtagcctggcaggactatgtgggcttctccatcaagatctttgctgtaagtaactctgatctctctgcagaggttgtagtcctggtgcccctccacctccccagggtgttggataatcctgtctcccctctggctaagttgtttctcctttgcccctagagtaaatactaggttggatttggtttttgtcagagatcatcagattgtgccttgaactggttggagataaatgacattcagaaatggatctagtttaggcagtaggtaccatgtccaccccttaacttctagctctttggccataaaagctcacagcaaggtcatgtccatggacagcttgagaccacaaatggttcattcttgtcccttgtctttcttttatccattgtgttgtttgacttgggaaatattttccagactgaaaaaaaccaaacatgacttaccctcccacaaatccctgaccaggacattttagtcttttgtgaaatgtaggtgtgtagtctttaagcaagtgagaataccaataaaggccactcactatctgccctgctgggtcactgataacgatattaggctctcaggatgctccaagtgctgaaagcttgagtctcctagatatgatgccttaaagcggcttctctgatcctgaatattcaatgactgatcagtgaaaaaagtccttgatgaatgtcagctggacggggggaacaggatcgttgagccttgtaatgtcttgggaagcatacagttctaaggtctcacctgctctcgtgcatacatttctgaaacgtgtctgcataatgagtgcttataaatgaaatcattttctatgctgcaagtgagtccgcttctccaaagggactctaggagaatatttacgtgccttataattgatgtaatttgcaaagtcaaacttctcaaggtggaatttacatcagaagagaaaaatgagagaggcaaggatgtagaccagttccttttgcctctttctctcagagcctgctgtctcctgtggcttttggattcggctgtgagtatttcgcccttttcgaggagcaaggtatcggggtccaatgggacaatctctttgagagcccggtggaggaggacggcttcaatctcaccactgcagtgtccatgatgctctttgacacctttctctatggcgtgatgacatggtacatcgaagccgtctttccaggtaccccaggcttccatactgctttggctgactgaggggcagagcaactttcggcctgtaggttcttcctttctttgtgttgcagttgctgaaggacgagggagcgccctgggaattggcttgggcttttagcttatgaaaaacaaatagtctaaggaaaggcacttgtgttgaaagcatgcatgttactggcattgtgctacacatctcttgagcccagtgtgccaggtgctgagcaaagtactttatacagactctggttcggaaggttactctgggctgtttgctaaggtaaacagtttctaaaagagagagctaactgagagtttgagggacttgcctaaggtcatgggtctgttaagtgtcagtgcttggagatgacctcagctgggctatactgggtcagagtctggcaggttcctctcagtactgactgggttcttaggactatgtctccagaagaggaagccctaggagaccatctgtctcttaactacaggttataagtaatataatatattgggtcttagcccttgcctattgcttaagggaaattagtattcaccaaaaattaattttgatgctttcttacccttctttgccaagtacaacagaacaggaaccctctttaggatacatttctgtctgagatcagattttaggggaggactcattttcaccctctgaatctcctccaaggaaacccatttgaaatgttttttaaacccgtatctgaacttcctccattgaccatgcaatttgcatgtatattctgagattcaaactcttgagtccttattttttggggtaagtgaccttggatagggctacttgtccttcagtttgctcatctctaaaatgaggttgctgttaccacctggggagttgttggaaagctgtggagaggtgcagaatatatgatctgcccagtagatttcagcaaaagttagccgtctccctccagcctattcctttctcatagggttggtcaaggagaaagaggatttggctagacaatgtcagaaatgctcagattgcaccagcttgggtcatacctgtgttatttgtgctttgctttcaggacagtatggaattcccaggccctggtattttccttgtaccaagtcatactggtttggtgaggaaattgatgagaagagccaccctggttccagccagaagggagtgtcagaaagtaagtaccacttaccagcactctcccacacctaatgctgctgtggccctgccagagcagggcatgcctcctacatctaacgtgatcccaaaaccacaaccacggtagaaaaaccccatgcagtccaccctctccaaatgcacttcttccattgccgtcgcatgcacttaagggaaccctatctggctcctgaggaacagttctaggaaagtatgttttgatcagtgtaaccatctttttcccatcttggataattgtgctattctgtgaatccaagaggaataactacagttagccatcactgtgggcctcatctctctgcctgccttgctggggtggtctatgccagggaatctgtacgtgaatgccagggggctgttatagatgcagcttgtgcttcgtaacttcccatcctttcttacacagggcactaatcccctcttagctcctgactggaggtagaggtgcccctgttcttcccagggtttctgtttgtgtctttgttcttggtgtggcttccttctctattgtcagtggttcactttcttcctgtgaggtcagtagacctgcttccttcctacatggtccatagtctgctacctcctacattgtcagagctgcttcccctctacactgtcaataggcctgcttcctccttatgctgtcagggtctctcttatttgcccttcctcagatcttcagtggttagcttttggtacaccctggtgtggatagcaggcaatttttaaaattttattttatttctttatttattcactttacatcccactcactgccctcctcttgatcaccccctccccctccctttttcctctgagcacatgagagcatctctgagtatcctcccaccctggcacttcaagtctctacgaggctaggtgcctcctctctcactgaggccagacaaggctgcccagggagtagaacatatcccatgtacagtaaacagcttttggaatagcctccatgccagttgtttggtacccacatgaaggccaaattatttttgtttgtttgtttgtttgttttggtgagtccttttctcacttggtataattcttttgatttccactcaaattgtgatatatttaattcattttttccttaatgagtagtattgcacagtatggacatccatgatacttttagatatgtttttaaaatggctgttggcatactgtattttaattgtttgtgcagcctttcttcatcaaaagactaatgtggttttttttataagttcattgctactgtcagctcacgtgttccaaggggcttaaaatatttcatcttgtgtttgtctacaacattaaaggttgagcatagacagaaactagttctaaaagtctaagcatagacttttgtatttgtgtactctacggatcagggcagtgtttcctgtgggatcatctctgtctcctttcttttgtcacagtctgcatggaagaggaacccactcatctgaggctgggggtgtccattcagaacctggtgaaggtttaccgagatggcatgaaggttgctgtggatggcttggcgctcaacttttacgaaggccagattacctccttcctgggccacaatggagcagggaagaccaccaccatgtaagaagagggtgtgactctcccaagatctacctcaggaaatccccacttagaaacatagacctaaggaaattgaattggtcgcttggctaagagtggagcatgatgggaaggaatgtgtcaatcacgagaatgctttctgaggtctagattttgctaggtcttttcctttagtcttttccttttgatgagctttcccatgcaatactcagaattcctcagctttcttggaatcttgaggtttctgaacttgttggttcagaaatttgaagcatgagactagaaagaaagatcaaacaagctagaggaaaaaggacagtcccccaaaaaaatctatctccaagcagaggagagaaggcctggacagctctctccctctgccttcccagggacctgtgaggacagaggaagggctatagaatatcatagtttgcttgtggtttgtagtgtggtccctctgccattccagaggttgatcttctcggggtgacaggctttcttcttcaacataaaaccagtgtgttatgaacatgactgagatactcagaaattctgttatgcaacacactcatttctttcttttaacagtacgttcttgtttgttcatttttctgtacaagatgttaggcatacaaaatatgttttgaggagtacatcctggtgcaaattaagagtgtcatttttttttcagatgctcttagcaaactcctcttcctaagacataggcttatgcttacccactcactaaaacaaatggcctctgctccatgggcatctgttagattggattggagtagattagattagaaaggaaagaatcatgttaagtggtgtgatctgttctccttgcccaggctctgcagccctgaatagtgaggctgggtcctcctgattcttgagtctgttattcttgtcctcaggtcaatactgactgggctgtttcccccaacttctggcacggcctacatcctggggaaggacattcgctcggagatgagctccatccggcagaacctgggagtctgtccccagcataatgtgctgtttgacatgtgagtagcagaagtgcacagagaggagcaccacccccactcccacacttcccacccccaacccctcaaccccctctgggacctgggagtcctggtggtatgagtagagtattactagagaatttcccttttttgggtatggagtggtagtaggtctttcctttcctgacacacaatgacaagttgccttttaatttcagggaaaaaaggtgaagttggtgtattggctgatgggatttagaaagccatgttctctgttactggattggagggtgtttatttgtttgttttgttttatttttagctcagccatcttcctgatgcattcctccttgctctagtttgtttttggttgctgtgataaaacaatgaccaaaagcaacctggagaagaagaggtttatttaattttataattctttggtcacagaccatcactgaaggaactcagggcaggaacctagaggctggagctgaagcagagacaacagaggaatggtgcttagagccttgccctccatggctaacttaacttactttcttatacagcccagaatcacctgcctagggaatggtgccacccacagtgggctaggccctcccacattagcctctaatcaagaacatgctccacagacatgtctataggacaatatggtagaggcagttcctcaattgagggtccttcttcctgagtgactctagtttctgtgtagactaaccagcgtattcattaaggcatggtacaagaacctcaaaagagagttggcacaatggccctgtgttctctgctcaagtttgctcccacccaggttgtcccaccagcaagttggatcctaaaggagccctggtagtagagcagaggaaggcctgagctctctggtggaggaacaaagaatgtcctgagccctctgactgcaggcaaagcctttctttccactttgtaggttttaaggtccctttttctaaattcaatggcttggacctcccttactttagaacttgagacccattgaggttcattcacattagtgaatgctgagctaacatggtcacaaaaaaaactgaatggagaacctggaatttaaagttttaacggcctggtgtcttgtgatcaggcctgttgggtatatccttatatatgcaccattcattaccatgaattctcccttctggttgccttttttttttaaagaaattgagtgctttttaaaggcaagaacggtgtggaagagaggaaaactgtgccaaggtacatccatcctactgggccccgagctgacctgcccctctttcccccaggctgactgtcgaagagcacatctggttctatgcgcgcctaaaggggctctcagagaagcacgtgaaagcagagatggagcagatggccctggatgttggcttacccccgagcaagctgaaaagcaaaacgagtcagctctcaggtgagccccggacaccttcctttccttccttctccagacaagcacctagagttcaagcctggatgtttggtgacagaatcctaaccctcttatgtctccagatgggtacttccagtcatctctcaccacgccttacccccacttaccatttgaggatgtgtcttgctctgtcttgtaggtgggatgcagagaaagctgtctgtggccttggccttcgtgggtggatccaaggttgtcattctggacgagcccacagccggggtggacccgtactctcgcaggggaatatgggaactcctgctaaaataccggcaaggtacatgctgttacttatttccagtcatgacccagggtagagaagggctcgtgggaattgtggctgattgtgttagttgcttctcaagaaaagttgggagcctccttgaagctccgtttctgtcctgctgtgcaagattcttgtttgtttgtttgtcttgggtttttttttttttttccgagacagggtttctctgtatagccctggctgtcctggaactcactttgtagaccaggctggcctcgaactcagaaatctgcctgcctctgcctcccgagtgctgggattaaaggcgtgcgccaccacacctggctttgcaagattcttaagacgtatacttcattatttaagggcctactagaagagcagaaagggtataagcatacacatacatattgtagttagaccatgtccttgttcatgttggccatgactaatgggaatgtctgtaaacttcttagcacacttgacggagcaggatcccaaataaatactgctctcctttttgtgacaattgtaaactgccatccccccaagccttgccatcctggggtcacatctatggaggttaaagacctccccatgtctttctcatatgtgacatctttgccgtttgtgccactttgatcagtgagaactgacaagtcccaccgtcccgtctccttgtctccttgtgtttgtgcctggcaggccgcaccattattttgtctacacaccacatggacgaagctgacatccttggggacagaattgccatcatttcccatgggaagctgtgttgtgtgggctcctccctgtttttgaaaaaccagttgggaacgggttactatctgaccctggttaagaaagatgtggaatcgtccctcagttcctgcagaaacagtagcagcaccgtgtcttgtctgaaaaaggtgagcagccatcttggggctgggctggtgtggggatgaggcagccagggcttgtttccatagatggcttgcacgttggcgccccacgctgctaagattaaggcaacattcccctcgctttgtgggcctgttgcagtacatcatggttcctgtgtggaaggccaggagacctctgctcccgccacactagttctagcccagcccctttatattccctctgcaagtgccctgggttatggagacaagccctttgagggctttatcctagcaaagaaaagagaacttgccaagaggtaagagtagccttgctacaggatgccccgccattcctacctgctgccttaaatcttactggtcttgactttgaaactatgaaacaccaaatatttactagatattgattttaaaccctcccatccccttatgacctgtgggtttagaaaaaaaaataatgttaacagtacatttttggtctgtttatatattttatattttccaagtgtagagcaacctagggaagacaggattatgtttataatctcagatgaagggagtgaggcttgtaggaactgtagcatattcaaggtctcccagcaaggacataaaagcgaggaccagaatcctggatctggtttgttatgtgtttcttacatgctacatgtttgagatgtgtttgtgtggtcagtcacagcaggccacctacctaccctgtctcctacctgatttgaactcatatccatttattttcctgttaactggagccgaggcctcattcaagtgtggtctgaagtgtagcatagcagcctcagttgggaattcattacacacatgatgacttgggcccccgttcagacctactggatccatctctgcatgttaataaggtgcctgagtaactgaatgcatattcacatcgaggaagctttcaattagctaagtgttcaggtaaatcccacgcggggacagttggcaaatgaccagtggcagcattgatctgtggccacagttctgttgacattcagtttgctgacttctctcaccctggtcagtgaggccgtccatatggagcacactcatggcagcagtggtctctgaagccatggctgccagcggcacacttcccagggaaagctttctgctctagttttatgccgtagaacttcctggatgctctgtccatcaaaggtggtggtggcggctatgcccggtttgacccctgacccgttctcacctccttctttgtcatcaggaggacagtgtttctcagagcagttctgatgctggcctgggcagcgaccatgaaagtgacacgctgaccatcggtaaggattctggggtttcttattcaggtggtgcctgggctccccgcagctgggcagagtggaggcagaggaggagaggtgcagaggctggtggcgctgactcaaggtttgctgctgggctgggctgggctgggtggccgtgggagtggatgtagcctggtggtggcttggcctaacacttgctggggagcatggggcttggtcttggggctgggagggcaggattccagagaacagatgtgactggaagtctggggaataccttggggggcgggggagtggatttagccagatgctggatgagatgtagaaggccaagccagttggaagggagttgaactccacatctaagaatggtgagagcccaggagattagggagaacatttcaatttccctcgagcagtgcctatgagagactagtaccaccagtggcatatggaataaaaatatagagctgactgtcccaacagctggctttttccaggaaggtttctgcttccacaaactgtttgattagtcatctcctgaggtaaatcatggatagcctcatctgaaagttgacagaagggcagggtcttatatgctttctaaactcattctgttgaagagtcctggtacagacacattagacacaagacacccatccatcacacacctagtgactatcagtgggcttaggttttgtgacgtaagaatgagttaagagacagtctttgccctcctgctagagacgaataagccaatgggtttggcatcttaggacgtacggtatatacggggtgcttctgagctgttgggaaagggagaagcaagctggccctttctgtggagtctgtgatgactgaacaccttcccactctggtccctgcagatgtctctgctatctccaacctcatcaggaagcacgtgtctgaagcccggctggtggaggacattgggcacgagctgacctatgtgctgccgtacgaagccgcgaaggagggagcctttgtggaactcttccatgagattgatgaccggctctcagacctgggcatctccagttatggcatctcggagaccaccctggaagaagtaagctcaacaatcccaaggccagagaggccacttagcctggcaacaagatggcaatagagttggttactggaagtttaaggcattcgcatctgggtaatgttagcccaagttaaacaatgtaagagcgtaggtagtgggagacagcagtgtgttggagtgttaggattgctccctggagtgaatagtgttgtggccgggtgacaacactcacacatagtaaatgactgatagttatgaccagtcgactggagccaggtgctgaacttgatgagtttggtgtttttgttttgtttgtttgagatgaaacttgacgaacagcatttctcccatcctttgcattcttccaaatcatcccttacacttctccttgctcaccttcaaactttggcctcgtttattttattatcattattatcattccaagtagcagtatctgtattttatttaagatttatttaatctattattattatttaatctgttattactattggtattttatttgtttaagatttacttatttgagtacactgtagttgtcttcagacacaccagaagagggcatctgatctcattacagatggttgtgaaccaccatgtggttgctgggaattgaaccaggctctctgtcagtgctcttaaatgtctgaataatctctccagcccctgtgttttattttttttaaataatatttttacttattatttgagactatattccagaatattaatggtcttttttcagttccttccagatccctcatccttacctctctacctacccaacttcatattttctcttttaaaaagacaaaataagttcatgggatctatttgtgttggtggactgctcctgggtgtggggtgtggcctggagtgtggtcagtgtatctgtgtcactccattggtggcctttgttttttaaatattgaaggctcattaatgatcacagcaggatgagaattaataatgatgttgatttaagattatgaatcagaggtttggggcttcaaagcccaggtaactttcctatgtagcaatgcttctctttagagatacaacatcacaagccttcaggcctgggacggctgtaaacattgtctgccttggctggttcccagggtagattgtgcagtagagtcatctgtgatgacagtagagatcctaaagctcctgtcttgcgcctttgagttgggatttctgtagacatgactttttgagcttctgtcacatgcttcctacagagtggtctgtaggcgggcttggaaatcagtgacttcattcagatgtccgtctactataatatttatttctagtgataagaagctcatttcctcgtcgtttgtcttgcatgagtgatcccagtgctgtcctgctcaaaggtctgggagcacagacctgagaaaagtgacttgcctcgttctctgtagggtcagcatgaatttcatctacacacataatgtactggtttgtttttgaaagagttgcctggactgatagctgtcacacgtgaggagatgttttctgccccaaacagcttctctaaaattctgataaaattcttgttgataaatgcagcctctaccttcttatcttaagagcctaacgtgggattccataacctaatctgggaagtgataacttctttcataaaacaagtgctcacttatattgtatcctgctttaatttctcagatattcctcaaagtggctgaagagagcggggtggatgctgagacctcaggtaacctgtctgagagggctgcacactgggtaggctttctgttggctgttggagctaaccccctttgcattggtctgattcaatcccattgttagtgtatgggtttgctctgggaaggtttgctgtcttacaaataaataaaccataggattccttccttttccatttagatggtactttgccagcaagacgaaacagacgggccttcggggacaagcagagctgtctgcacccatttacggaagatgatgctgttgatcccaatgactctgacatagacccaggttcgcacgggcaggatctctgttctgttgtttgaacttgagtttgtcttttatgtgtttcttagctatctctttgatcgcctttggttaagatcacagattctaacaggttccaaagaaaagtggaaaagatgagagagccccttttccaatgtggcatgtctggtcagacatgaagaaaccctcccttatcacatcatctaatagaaggttttctcagatgggtatgagaagatgacccatccatgctctgaagctgtttatattgtcatctctgtagggtaccagtttcttgcacacctaagtgcttaagtgttgaatgaaagtgtattgaatgggtgtttgattttgaaggaataaaagaggaagttgtgttctttgacatgtatattttttaatgactgtgcccatatgtggttgagacggagaagggcagtatgaaatgaaacgaattcgtagacttgtctaagtgcctcagttagcagtcattagtttcagacaaggatttctagacaacttttggtgaggacagaaaattacctgcttttatgagtctgcctttttgtacttacttcatgtttcattgtcaggacttagatgttttaaatgtgttcactttttaccatgcatataaaagatagaagactaataaccatcatgtgccagcctacgtgaattccagttcatggaattgggcacagcttgcttctgttatttgtgtgcacatctttgcttgtcctgagggatcttcattctctgtgctcatcagatgttgagaaatataactttgagttgaaagttgagtttttcaagaaacctgtttactcctgtgaggtactggaggcttcaaaccccagcttccaagatgactactgaagctagtagaggaaagagtagagtcgtacagagacaggtgacactgattatagccaaccctccatttgtgctgcttacagaatccagggagaccgacctgctcagtgggatggacggcaaaggctcctaccagctgaagggctggaaactcacccagcaacagtttgtggcccttttgtggaagaggctgctgattgccagacggagccggaagggtttctttgctcaggtgaggtgtgctgggctctgccttcttggactggtgaagacaggctaggactgtggtcaagatagagatgctgggccagtatgccagtgatttccctgggcttcaaattcttcatctgaaaatgagcggggatgtgtggctgttagggggatgaaacgaatttatttagaatggactttgacattacttggggaggtggctataatttagaggagatcatggcagggacacagtttagacaaaccagttgggaaaattcaactctcataacatgagagtcgccatgctgagttgtgcttggcagtgtacttattattagaaacatggtgggtatgtttttctcttaattgacgagagcgagagagctaggaatggaacaggcccattgattcccccatatcacagtttgcatgctgacttatcagttaaagacagctataaagttacttcattctacaaaatgaagaattatagagaacacgtccatgaagccctccctgcagcccacctgggcaacactaactcagagcatgagcatgaagcctgcagatctggatttggaatctggttcagtgaatcactggctgacttccctcagatccatgatgctctagtttgtgaatggtgataatgatactaacaccaccaataactacgaaataggatattaagggggctgattctcactacagtactttccagtggaattattcatccagtgataattttctatattgaaatataggaatattaaaatcagagtgattgtttggattcttatggctctggggatggaatcccagggtgtgtgagctctctactaccaagttacacctgcagccagggttaccattgaatcactgaagtttttaaagggtaaatttctcagaaaggaaggaagagatcccttagctgacccatacattatgttgttttcagagaagggatataggaaatttggggaatttcaaggaaagatttagataattatgcttttcgcagtgctcataggagagatgctggctgctgctgcttctggcgggggagttggtgtcatgttctcagtcctcagatttactgatgtcacataggacccctgcaagtggagatggaaccaggattcagtctcctggctcccagtccagggctgttcagccttctacctgagtctatgatccaggctggtttttcctcagtctttggaggggagaaaggattgagcctaaagagtcagtcactctgactctttactctgtgacattcccagcttttgcctctgttaggtgaccatagcctctgtctttgtgctgttagcatccggaaatgccttgggagaaaggggcttaattttcagtctcctttctcttcaagctgccagaaataccttggtagaactcagccccaggccttgcctgtattcctcattcctgtgttgctaggctatggggctggctagactttcaggggcttgctcttcaggcttctaaaaacgtgtcctattgtctcttccctctccaatgcctgtttatagattgtcctgccagctgtctttgtttgcattgccctggtcttcagcctgattgtgccaccctttggcaagtaccccagcctggaacttcagccctggatgtataatgagcagtatacatttgtcaggtatgtttgtcctttgtgcctcagggcagagagggttgaaacagaccaacagtgtttcgtatactgagagccaaggagtcagaatccacaattctacagtgggatgggtcttgtcatgatggttcaggctcctatacaagccaatactgtagcaaagaacaatagtaaacgatactgggaaatacaggtgaatctctgctgggcatttccccttgtattgttaggctcttgtcaggtatgctttaattcactaatcagtaaatctttcaggttaggatgttagctaagtgtgcatcttcaggcaagaatgcccctattccatactgatcctgttaaaaatcagaagataggggacttttgagaccttgtttagtacaggttttcttcagttctgatgcacgggtaggtctgtagatgggagaaagtggcagtaatatagagggacgttttaaaaactctgtgtgaatgtgtgtgtaggatatgtatagatcatatatagattgtttattagcctctattgctctagctcactttcatctcctataggtaaaagttcgttcgatccctttctagccaatgacctagcattgcccatggctacagatcatgacattggtttgtgctctaggcccattatttcttggactttttaattgtgcataccaataatcaataaaatcttcctgtctgttcttggaatatcctagctgtcagtgtcaagtggtaattatcaaagtagttttgaaatactgatcttcaatgatttttgtatgtgtgtgtgtgtgtgtgtgtgtgtatatgcacaccttcacatgtaatctctgcacatgcttcattggggacactgtatgtcaccctgatggcagatgtttgaagctccttgcaggtggcttttgtatataatttattttagtcttagaagcccattcctcagaaaacacttagcagagcgttttctgtaggaacttttcctgcctccaagtcctggtttggatgagcgactgacctggatgtctctcttgtatctctagtaatgatgctcccgaggacatgggcacccaggaactcctgaatgctctgaccaaagatccaggctttgggacccgctgtatggaaggaaacccaatcccgtgagtgacacttcagccttgagctgccttctcatgacggccgccgggttttctttctggtggtattgcctgtttcattgtgaccactgtcaggtttttttttttttttcagtcaatttttattttaaaaagccagaggataaccaaatcaatttaggaacaaataaactcttctagcaccctgtacaccaaatcattaccaacatttgtttactctgctgtatgttgattttaaatcacagtgttcacttactgaccaaatgctctccccttctctccttgaccccagctcccatacttgcgtgccatagtagactggtgtgaagtttgcatctttgcgtatcagtttctttaaccaacagagatgacatactgattgcatttttataacaacagagactttttttgtacagttgcatattttcatcaggactagttttaaaaagtaggtaaataaactcggtgatatgcccagttgactctctatgtactgaagaagcaagtcattgggacactgtggttaaaccagtggagaggtgaggtgcagtgaactggagctagaagacttagcttcaagtttgcaggtccagagagaatttatgcctgaggtccatatgcacgggcagtgcgagatagctaaggaactgtggagaatgatagagaagcacaaaaaggaacatttgaatcccaaacggcaaaggtgaagatggccagtctgtgtcagagcactgaatccgatggctatgtttataaaaaacctagcagatttggagatgaatatttctgtgtatttgtcagtttttaattattatttacttaattacttttctattgctgtgataaaacaccatggccaaggcagcttatagagggaaggactttgtgggggaggggggagaattacagttccagtgggctaggagtccatgagcctcattgtgaggagcatggctgcaggcagagggatatgctgaggcagcagcagagagctcacatcctgatccacaaacaggaaacagaatcttttgaatggcatgagtcttttcagatctcagagtctgctcccagtgacacacctcctccaacacagccacactacctgatccttcccaaacagttctaccaactggggatcaagtattcagatatcagcctttgggacggttcaaaccaccacagtatcagatgatgtgttagacaatgttctgtccctgagaaaatcaacttatgaggagcagaggtttattggtgacttgtggtgtcagagcttttggttcatagctaattggctgtgttgtttggggcccctttggggtccctagttaggtagagcatcgtggtagggatcatgtgcttccctacaatataatagctgcttatatcatagatgccaagccagggagcaaaagaagaggaagaaggcttgaggttctatgatttcctttgagtgtgtgtccccagagacatatcttacttctcttaggtcctgcgacttacatacaggctctgtcagcacccaggaacaccacaatctagggatcaagcctttagcatttgagcctttggaaaatattgaagactcaaaccatagtaggtagttactaaatatccttagtacttactagaaggacacagcttctccttaacttcaccaaaaagttaagattccatgtgaaggttttgtaggaaaggaggatgaggtaagatgataatctgggtagctgggtcctttgttggtaagctgaattgtatggattcggggattgattccagcaaaggccagatctataggagagagaactgagccgacagctggcctgcagagataaaagaaatgtccatgacatcagaaagtatgtgtgctgtctgtgcaccatggatgctctgctggaagcagtctgaaaggcagagcctcaccccaccatctcagactgaaattcaaattttaggttcctggggatcattaggatagagaattctgactaagttgctttttcaagtggtctttagtttgtctcagcctgttgtcttttaaaggtcttaggtatgagtttcataagggtaaatattttagggaagaggctttaaagagaaaatgaggaattatttgcgtaaaaagcacttgtgtgcatatttataaacacacacacatgtgcacagacctgaggtgtaaaggttgtgtccctagtttaaattgtggaatcttgaaaattggaaatatggaagagaggctagaaatgagacatcattttatactcttattttatcagtagggataaatgaaccctgagattgcaagggacttgtgattcgcaccaaacagtcagggccctgcgttgtctctgaggatgctggtagacaacctcccctttcatacagtgaccattcccactccactcagctcaagtctctgctcattatagaacatcatttggatcttgccattctccacaagactttgaacatgctgagcctaagatacaagctcctaaccatgactctgtcatggagctcctcccctcttccctcctcattgtctgagagctcatctcataaccttcttgttttcatcaaacacatacactcatttctttgcagagcctttgtatctgactgcccacgggtgctgcctggcatgttcattctccactgttcttttaaaattaatttatgtttgtgtgtgtgtgtgtgtgtgtgtgtgtgtgtgtgtgtgtatgcatgtcatgatacacatgaagaggtcagagtataacaagatcgagagattgaatccagttttggctataggtacatttatgtaccaaggcatctctccagcccattatctcaattctttaactagctgatagtttttatgttttggttgaagctgactcaaaggtctgctttctccatgtaccttcctgttgtgtttgctttatctggggttatgtaagattggatttgttgacttgtagtccctgaagaatccatgaagtcagagagtttgcattgctttctccagactcccaaagatgcagaacactgtgcagcccatagtggactcttctgtgtgtcgtgtcagcaaactggttagctgggttgagcagagctctgcgtgaccatctggagcctgttcacgtcctattttcctgggttttctgtgattcccagcttccacaggcttctgtgagagcaaacataatgaagtcaagctgtttttcaaatggtaggactaggcacatgggtcctttctaaagagcaaacctgagctctaagagcatcaaggaaagacaggcccctttcaggagagtctagaacatttgctatctccttttacagagataccccttgcttggctggggaggaggactggaccatcagccccgtcccccagagcatcgtggacctcttccagaatggaaactggaccatgaagaacccctcacctgcgtgccagtgtagcagtgacaaaatcaagaagatgctgcctgtgtgtcccccaggggcaggggggctgccacctcctcaggtgagtccctgtcggcatgactgagaagttggctcagggtaggacctgggagcctctgtgtggcagcaagaatgagtgacatgtgaagtcactcttgatctctcttgagaaaagtgagtgggttttgagagaggcgagtgagctacattgtgccagtgcctgtcacagagcatctgtaggcacagcttcctttcctggtgctgccacagtgggagctgctggccctgttaactctttgggcctgtgttttcacttcagagtaaatgggccacaaagcttaggtgtatctcatcaactctgacattctctgggctctgaggtttggagggagatctgagtctgtgtgtgtgtgtgtgtgtgtgtgtgtgtgtgtgtgtgtgtgtgtgtgtgtggtgttttgtttttgtttgtttgtttcccctgaaaatttcaggacagtagtctaggttggagggtggggacagggaacttttagtggatgtgaaaacttaaggaagtcatgcttgtcactttaaaatcatctggcccactcaccaacatgactcgaaagtatagaagaattcattgggcagtttatgatgctcttccttaagtattcaggtgatgtggagaatcccatctagatattcaagtgaatactttcctggagataattttggcttggtatgagcgagggacaagtgccaatggtcttggtggtgactggctgaggttcttgcgtaggccctggggtcctattgtttttgtctgttttctgccctgattcttacctgtatgatacgtgagcttggtttctatgtgatgacagagaaaacagaaaaccgcagacatccttcagaatctgacaggaagaaatatttcagattacctggtgaagacgtacgtgcagatcatagcaaagaggtatcgtcctgttgaaacctggcttgctgcagatgtagacttgagcggtagggaaatggacaatcatggctctgtgggaaatttagcacttgatatcagttagacaagatgatacgggggcttgtgagccttgaaagttcagcttagagaacgaggctgcctgctttaggctgaaaataagtgacaaatgtggactcagatttgaattctgacccattagtctcataacatcttcgcttatatgaattttaatttttattttacatttgatgttagtgttgcactcttaagttcgtggtgaggggtaagagagatgatacgagcaaaagcctgtagatcctctttcctgtatggctccataaacaaggtcagggtagacacagtagcctttctttcatatggagcctttaaagagacttgtaaattcctgggacatggtcatatagtgaccaatatttagtcagtgtgcagagaatatgtttcctttccataagtatggtcaggtgtccggtccataatgtttgaactaactttaaatgacaaggatataatagaataagaataggccatgcatttctcagagctgtaatgttgccacatgagagtcacaataaacagcatttagttcagtaatatctgggatggtaatgcatttatttgtgtgtctgtttgttttagacagggtctctgggtctgtaaggcatttatttatttgtctgtttacttaagacagggtctcactacattagtcctggctgtcctggaattctctctatatagattagggtggcctcagactcatagagtttcatctgcctctgcctcttgagtgcagtgctgagcgtaaaggcatgtaccaccatgcctgcatgtaaggtgggtttttacattggcttaatttactatgtgattctcattagagtaaggtttctaagacagcagacaggacatgctgagagtggccttccttacatgcatgcaactctacagcactggtcataggcctagttaaagaagtgcccgtttctatgctttgtcctcaagtaaatgattactgttgcctcgtcactatgacctctgctttctagatctgatttttggtttgtcttttctctctgcagcttaaagaataagatctgggtgaacgagtttcggtaagtcagtcccttctccccattctccctgagtcacgtcaggtctcaggagaatgatttagatgtagggctcttgaatcaagacagagttacaggtttggggactgttgccttgtgcacactcttgggtgtcacctcaccttgagggggactggggtgctgcagaccaacacaccaaggcacggttatagtagactcactgtggaatttgtgtaactcattcttcactccggaggcccctgaaatatttgatacagtgatttccttgaggaatttcagaaatcactcatgggcctcttgagacttaagaaagtaaaatgtcatgaaggaaaaaaaaacctatcctagctgtattttcccccagacagattcccaagtgtgcccagggactcaaggaaaacctttcaggcctttcatatgatgtgaggtcttggtggaaaggaaagacatcaaaagcatttgtttccaccctgtttccactgatttttccctactggattttgaaggagcagttgagagtagggaaggaagcattcttgaagtcatgagtggcccatgtggctgttccaaagacctcaaaggttttattctcaaatttccattttccaccctgccttttctccaggggtcaggtccctggagctctgagcagagcagtcataggcttacttaatgccagggaagatcacctgtctgtgatccctccctggttttcaagactgcccatcttcctgtcttcccgcctatagcatgggtgcctatcattagctctaggccttccctactgggcagcaattttgagaattaagatagctagatttcaccaggggaggcaacatgtacctatcttagccaaacgttggttctagtttgaaaaagaggtggctctccgagaaccttgtacactgtgctatctgctgccgtgagtaatggcttgggtatggcttttaatggcgagcctttcttttaggtatggcgggttttccctgggtgtcagtaattctcaagcacttcctccgagccatgaagttaatgatgctatcaagcaaatgaagaaactcctgaagctgaccaaggtacagcatccgtccagacacgggtcagaaaagtgggtctggggcctaagccacagcagcagcggtcgccatcttggtccgggacccgccgaacttaggaaattagtctgaacaggtgagagggtgcgccagagaacctgacagcttctggaacaggcggaagcacaaaggcgctgaggcagcaccctgtgtgggccggggacagccggccaccttccggaccagaggacaggtgcccgcccggctggggaggcgacctaagccacagcagcagcggtcgccatcttggtccgggacccgccgaacttaggaaattagtctgaacaggtgagagggtgcgccagagaacctgacagcttctggaacaggcggaagcacagaggcgctgaggcagcaccctttgtgggccggggacagccggccaccgtccggaccggaggacaggtgcccgcccggctggggaggcggcctaagccacagcagcagcggtcgccatcttggtccgagacccgccgaacttaggaaattagtctgaacaggtgagagggtgcgccagagaacctgacagcctctggaacaggcggaagcacagaggggctgaggcagcaccctgtgtgggccggggacagccggccaccttccggaccggaggacaggtgcccgcccggctggggaggcgacctaagccacagcagcagcggtcgccatcttggtccgggacccgccgaacttaggaaattagtctgaacaggtgagagggtgcgccagagaacctgacagcttctggaacaggcggaagcacagaggcgctgaggcagcaccctgtgtgggccggggacagccggccaccttccggaccagaggacaggtgcccacccggctggggaggcggcctaagccacagcagcagcggtcgccatcttggtccgggacccgccgaacttaggaaattagtctgaacaggtgagagggtgcgccagagaacctgacagcttctggaacaggcagaagcacagaggcgctgaggcagcaccctgtgtgggccggggacagccgaccaccttccggaccagaggacaggtgcccgcccggctggggaggcgacctaagccacagcagcagcggtcgccatcttggtcccgggactccaaggaacttaggaatttagtatgcttaggtgagagtctgtaccacctgggaactgccaaagcaacacagtgtctgagaaaggtcctgttttgggccttcttcttcggccaggaggaggtccaaatacaagatatctgcgcaccttcgctgtaagagagcttgccaacagagagtgctctgagcactgaaactcagaggagagaatctgtctcccaggtctgctgatagacggtaacagaatcaccagaagaacaatctctaaacagagtcaactataactactaactccagagattaccagatggcgaaaggtaaacggaggaatcttactaacaggaaccaagaccactcaccatcaccagaacccagcacacccacttcgcccagtccagggaaccccaacacacctgagaacctagacctagatttaaaagcatatctcatgatgatggtagaggacatcaagaaggactttaataaatcacttaaagaaatacaggagaacactgctaaagagttacaagtccttaaagaaaaacaggaaaacacaatcaaacaggtagaagtccttacagaaaaagaggaaaaaacatacaaacaggtgatggaaatgaacaaaaccatactggacctaaaaagggaagtagacacaataaagaaaactcaaagcgaggcaacactagagatagaaaccctaggaaagaaatctggaaccatagatttgagcatcagcaacagaatacaagagatggaagagagaatctcaggtgcagaagattccatagagaacatcggcacaacaatcaaagaaaatggaaaatgcaaaaagatcctaactcaaaatatccaggaaatccaggacacaataagaagaccaaacgtacggataataggagtggatgagaatgaagattttcaactcaaaggtccagcaaacatcttcaacaaaattattgaagaaaacttcccaaatctaaagaatgagatgcatatgaacatacaagaagcctacagaactccaaatagactggaccagaaaagaaattcctcccgacacataataatcagaacatcaaatgcactaaataaagatagaatactaaaagcagtaagggaaaaaggtcaagtaacatataaaggcaagcctatcagaattacaccagatttttcaccagagactatgaaagccagaagagcctggacagatgttatacagacactaagagaacacaaactgcagcccaggctactatacccagccaaactctcaattatcatagagggagaaaccaaagtattccacgacaaaaccaaattcacgcattatctctccacgaatccagcccttcaaaggataataacagaaaaaaaccaatacaagaacgggaacaacgccctagaaaaaacaagaaggtaatccctcaacaaacctaaaagaagacagccacaagaacagaatgccacctttaacaactaaaataacaggaagcaacaattacttttccttaatatctcttaacatcaatggtctcaactcgccaataaaaagacatagactaacaaactggctacacaaacaagacccaacattttgctgcttacaggaaactcatctcagagaaaaagatagacactacctcagaatgaaaggctggaaaacaattttccaagcaaatggtatgaagaaacaagcaggagtagccatcctaatatctgataagattgacttccaacccaaagtcatcaaaaaagacaaggagggacacttcattctcatcaaaggtaaaatcctccaagaggaactctcaattctgaatatctatgctccaaatacaagagcagccacattcactaaagaaactttagtaaagctcaaagcacacattgcgcctcacacaataatagtgggagacttcaacacaccactttcaccaatggacagatcatggaaacagaaactaaacagggacacactgaaactaacagaagtgatgaaacaaatggatctgacagatatctacagaacattttaccctaaaacaaaaggatataccttcttctcagcacctcatggtaccttctccaaaattgaccacataataggtcacaaatcaggcctcaacagattcaaaaatattgaaattgtcccatgtatcctatcagatcaccatgcactaaggctgatcttcaataacaaaataaataacagaaagccaacattcacatggaaactgaacaacactcttctcaatgataccttggtcaaggaaggaataaagaaagaaattaaagactttttagagtttaatgaaaatgaagccacaacgtacccaaacctttgggacacaatgaaagcatttctaagagggaaactcatagctatgagtgccttcaagaaaaaacgggagagagcacatactagcagcttgacaacacatctaaaagctctagaaaaaaaggaagcaaattcacccaagaggagtagacggcaggaaataatcaaactcaggggtgaaatcaaccaagtggaaacaagaagaactattcaaagaattaaccaaacgaggagttggttctttgagaaaatcaacaagatagataaacccttagctagactcactaaagggcacagggacaaaatcctaattaacaaaatcagaaatgaaaagggagacataacaacagatcctgaagaaatccaaaacaccatcagatccttctacaaaaggctatactcaacaaaactggaaaacctggacgaaatggacaaatttctggacagataccaggtaccaaagttgaatcaggatcaagttgaccttctaaacagtcccatatcccctaaagaaatagaagcagttattaatagtctcccagccaaaaaaagcccaggaccagacgggtttagtgcagagttctatcagaccttcaaagaagatctaactccagttctgcacaaactttttcacaagatagaagtagaaggtattctacccaactcattttatgaagccactattactctgatacctaaaccacagaaagatccaacaaagatagagaacttcagaccaatttctcttatgaacatcgatgcaaaaatccttaataaaattctcgctaaccgaatccaagaacacattaaagcaatcatccatcctgaccaagtaggttttattccagggatgcagggatggtttaatatacgaaaatccatcaatgtaatccattatataaacaaactcaaagacaaaaaccacatgatcatctcgttagatgcagaaaaagcatttgacaagatccaacacccattcatgataaaagttctggaaagatcaggaattcaaggccaatacctaaacatgataaaagcaatctacagcaaaccagtagccaacatcaaagtaaatggagagaagctggaagcaatcccactaaaatcagggactagacaaggctgcccactttctccctaccttttcaacatagtacttgaagtattagccagagcaattcgacaacaaaaggagatcaaggggatacaaattggaaaagaggaagtcaaaatatcactttttgcagatgatatgatagtatatataagtgaccctaaaaattccaacagagaactcctaaacctgataaacagcttcggtgaagtagctggatataaaattaactcaaacaagtcaatggcctttctctacacaaagaataaacaggctgagaaagaaattagggaaacaacacccttctcaatagccacaaataatataaaatatctcggcgtgactctaacgaaggaagtgaaagatctgtatgataaaaacttcaagtccctgaagaaagaaattaaagaagatctcagaagatggaaagatctcccatgctcatggattggcaggaccaacattgtaaaaatggctatcttgccaaaagcaatctacagattcaatgcaatccccattaaaattccaactcaattcttcaacgaattagaaggagcaatttgcaaattcatctggaataacaaaaaaccgaggatagcaaaaactcttctcaaggataaaagaacctctggtggaatcaccatgcctgacctaaagctttactacagagcaattgtgataaaaactgcatggtactggtatagagacagacaagtggaccaatggaatagaattgaagacccagaaatgaacccacacacctatggtcacttgatcttcgacaagggagccaaaaccatccagtggaagaaagacagcattttcaacaattggtgctggcacaactggttgttatcatgtagaagaatgcgaatcgatccatacttatctccttgtactaaggtcaaatctaagtggatcaaggaacttcacataaaaccagagacactgaaacttatagaggagaaagtggggaaaagccttgaagatatgggcacaggggaaaaattcctgaacagaacagcaatggcttgtgctgtaagatcgagaattgacaaatgggacctaatgaaactccaaagtttctgcaaggcaaaagacactgtctataagacaaaaagaccaccaacagactgggaaaggatctttacctatcctaaatcagataggggactaatatccaacatatataaagaactcaagaaggtggacctcagaaaatcaaataacccccttaaaaaatggggctcagaactgaacaaagaattctcacctgaggaataccgaatggcagagaagcacctgaaaaaatgttcaacatccttaatcatcagggaaatgcaaatcaaaacaaccctgagattccacctcacaccagtgagaatggctaagatcaaaaattcaggtgacagcagatgctggcgaggatgtggagaaagaggaacactcctccattgttggtgggattgcaggcttgtacaaccactctggaaatcagtctggcggttcctcagaaaattggacatagtactaccggaggatccagcaatacctctcctgggcatatatccagaagaagccccaactggtaagaaggacacatgctccactatgttcatagcagccttatttataatagccagaaactggaaagaacccagatgcccctcaacagaggaatggatacagaaaatgtggtacatctacacaatggagtactactcagctattaaaaagaatgaatttatgaaattcctagccaaatggatggacctggagagcatcatcctgagtgaggtaacacaatcacaaaggaactcacacaatatgtactcactgataagtggatactagcccaaaacctaggatacccacgatataagatacaatttcctaaacacatgaaactcaagaaaaatgaagactgaagtgtggacactatgcccctccttagaagtgggaacaaaacacccatggaaggagttacagaaacaaagtttggagctgagatgaaaggatggaccatgtagagactgccatatccagggatccaccccataatcagcatccaaacgctgacaccattgcatatactagcaagattttatcgaaaggacccagatgtagctgtctcttgtgagactatgccggggcctagcaaacacagaagtggatgctcacagtcagctaatggatggatcacagggctcccaatggaggagctagagaaagtacccaaggagctaaagggatcttcaaccctataggtggaacaacattatgaactaaccagtacccctgagctcttgactctagctgcatatgtatcaaaagatggcctagtcggccatcactggaaagagaggcccattggacacgcagactttgtgtgccccggtacaggggaacgccagggccaaagggggggagtgggtgggtaggggagtgggggtgggtgggtaagggggacttttggtatagcattggaaatgtaaatgagctaaatacctaataaaaaatggaaaaaaaaaataaaataaagtcatggtaaaaatgaaaaaaaaaaaaaaaaaaaaagaaaagtgggtctggaattgctggcacacaggtgtagtgatactagtctgaacaggtttgtatacaaagcagttcagataaaccagactactcatacccaacacacacacacacacacacacacacacacacacacacacacacgaacatacgtttctgaaagtgtaagtcaaaaatgaactcagagattaaaagctcttacaaaagccaagctgctaagttagctagtgggcaaaataaattgaatttcaaacagtttcctaaaacagccattggctagacaggaaatgggaaaaatgagttcattcactttccatgttggttggctgggctttaagagcagctaaggccatatttatttctccctatctcaggttgcccaagttgaaatggtcaggtgatgtggactctggggttttgcacagtagtcatgggcctagggcgcttaagccgtaggatgcatctgcatgacctatgggttttagttcttgggatgatgccaagagactctgaagaatcttggaaatttaatttactttcacttatgagtataggtggctagcctgcgtgcatgtttttatactacgtgtgtggtctggtacccacagaggccagaagcgtatatttgctcccttgagactagagttacagatgcttgtgagcccccatgtgggcgctgggaatcgaaccttggttttctggaagagcagactgtcctcttcacctctaatccatctctagctccaaattcttgggattatttgtgtatttatgtatttgtgtgtgtgatttaggttatgtgtgtgtgtgtgtgtgtgtgtgtgtgtgtgcgcgtttgtgagagagagagagagagagcgcgattttttcccatgacttgtgacttcatggcaacattagtacggtggattctagtgacttggtgctcaggaactacatatgcattggctttagatttaatttcagtgactgaagaggaagttgtcttggttgatacagggctgtctcattgcttgctgtcaccccttgtgtgtgtgaacagacacctgaggcaggattctgttgtttacaggacagctccgcagatcgcttcctcagcagcctgggaaggttcatggcagggctggatacgaaaaacaatgtcaaggtacacccctgcctgtgttctgccagcttcttgctaaacaataatcccgtgttccttgaaatcttacgggcaagtaactagggacattcgtggtagaaaagggcaaactgttagtcttaccagtgacatgattcagcatagttagtgactaagagaatgtgttttgccaccagacgtaacttgtaaactgctgtggtctttgccttaagctacctgacctgtttaagtatccgtttcctgtgcagcaggaaggcggcaaccatggctgcctctcactcgatgtgggtaactagttaaaagtgtaaaggtcttcacctagtccctcggccagtggttggtggatcctgaatctataatgcttttgtttggtgtgtcactaagtttctgaagtttccatgcacgttttgtgcatatacgcttacttcttgaagaacagtttggcagtattaccttgagtttggtctgttttacttcaggtgtggttcaataacaagggctggcatgctatcagttcgttcctgaatgtcatcaacaatgccattctccgggccaacctgcagaagggagagaacccgagccagtatggaatcactgctttcaaccaccccttgaacctcactaaacagcagctctcagaggtggctctgtaagtgtgtctaaagggatgggcgtgaagaccttagggtgaccgagcaccaggggaaaagaccgcaaagctggttgtaacagctagtaataattatgttgtatgagcctgagttgatccagactctgggcagaaaatgattggtttatgcactgactggcaatctttcttgacttgaagaaggaagaccagatatgtgaaaatcatcacattgataaactcacatgtagggaattaaaattgttagtgaaatccaagagtaattactacttcatttgcttgaaaatgaggtttttaaattcagtgaaacatgcatttaatagtttctttcttgaaacatgtgtatgcatgtgtggcacacacacacacatgcatgtgtatactcctgtacatgtctgcaaattttaaagtcttggaataaaagaatctggatttaactttggtgtctaagctttataggtatgtaatattagatgaggtaatttgtatacatttcgtcagccagcacccagcacagagttaataatcagtatattagatcccctcttggatatgtggggaatggcactttactataaactactgtagaatattaatgttgatcatcaggatctttacaagacgttgtataatgggctttttgtacatattagatggtgttagactgatatgtaatatgtgtgtgtatgtgtaatttttttatgtcttagcctgatatatgtatcctgttgctttccacttacttatagtatagtcatatgattaacttgtatgactaacttccagattagatttctttcttgtttgaaatagtttccaagccacaccttctttgtatatgggagtttacaactcactactctaagatcagaaactggagacaaatgaccgctattaggccacacctatactttgttctgtagtttcattatgggagtagacccattttaatattttccaaatcagttttaggtttgagttgttgttgttttaacgttacttgaaaataattagatggacccctgagataaaatgtttggcgactggggttttgttccagctgtgccttggttgtccttatgtctagctaattatataccatgtccccagctgcatcaaaggttcctctgatctttactgtctcttcccttctaggatgaccacctctgtcgacgtcctcgtgtctatctgtgtcatctttgcgatgtcctttgtccctgccagctttgttgtgttcctgatccaggagcgtgtgagcaaagccaagcatcttcagttcatcagcggcgtgaagcctgtcatctactggctgtccaattttgtctgggatatggtgaggacacaggaccttctatctctgtgtgaatctcaatggggactgtgaaggcatggggctaaggaaaaacagcctgccactaaccccgggaagtatcccacttagtgtaaaccagtgtaaaataggaaaaaggagagcccgctggatggccccaggacaccaaacataatgttagccttaaaatgtaattgcacaccatgggaccatctgaccaccgtgactacaattattaccaacgattaccttactctctagaccacagttcactatcaaaggcaatcgggataggaagtcaagcagggctggaacctgaacagggagctactgcagaggccatggaggcatgctgctcactggcttgctcctagtggtaccaaggaccagccttggcttggagaggggttctgaggaaggagtgtctgggagtggtgaaaacaaaggactccaagctctgctagagacagctttccaagctgctttctctctgttctgcattctttctctctgatctgctttctctggagatcgatcttcagacaacacacacactctctagacagctgtttcttgctattctctgctgagacagtcctttcttactattctaaaaagttctctggacaatgcatcgcttgcagatcataagcccagtcttttattttatatatcaatccagtcatttgctccacgttcccttttgattatcctaggaatcagtgacccagccctttgattcttaggagacagcaacccacatgtccttttaacattggattcagagatttgcctacctttgttaagcacaaaggataagctagctgggtgggatccggtccactgaccctgtcccaggagcacgtgttcccatcaaggcccatgtcggaccagcaccatggcttgctcagccttctttcttatagagcccaagaccactaacctatggttggtgccaccagacttgggctgggccctctcctatcagtcactaattaagaaaattctatacagccagaacttatggctgcattttctcaatttagttccctcctctcagattactctagcttgtgtcaagttgacataaatctagccagaattccctttaaaaattagactacaattagacttcataaaaacccaagccagaacttctaacttatctgatgtgttttaacttagagtcagggtgttttttttgtttgtttgtttatttgttgttgttctgggttttttgttttgttttgttttgttttgttttgttttgtttttgccttactaaggaagccatttgccactgaaaactccagcatcttgtctgcccattgtcgtttatctgttttgtatcaactatactgcattgttttcgtttggatcaatatgaacgacttcatagaaccatgaaggtccaattattggcaactatacgcccttatggccgtcattaattcagagcagatctaactctttgcccaataaacgtttcccccagacgtttaaaggcaactctcagtaaagaaacttctctcgaagacgagatggtatctgagagcacccgggttctctaagacactgtacagagatgcgtgatgatgacggagataatgaaattgcatatgctaatcaagacaagctctaagacctgccagtctcctgatctgaccactccatctatcaatattcctttccaaaagcaaagccctgaattaactctgagttcaggctgtggtctgaatggttccgagtctagaaaaagctaatctttatctaaagttgccctgccttatttctacttggtaatgaaactgaaacctatttcctgtgaactgttaatcagggtcttgttcattctgtgctaatgcgcagaatcaacttgtttgaacctaatcattttttttaaactgctattaaaactggatcttgtcagcatttctttgctttcttttatcttgacgtagcaatccattcatttaaaatccgctgagtgcttactgcgtgtttgatggtgtcttgctgtgctaggcagaggtcattcagagatggaagagtgagtccttgacctcagggacatcacttggactctgtgaacttctgaccctccctgcctaagagcctgcagtctgctgcaagcatgtggctattggagtcgttgataaacacattaagcagggtgggactgagaccttctgaagctacaattcttttacagtctgccaatccactatcacctccattccatgcatgtgctgcccccctccacctctctgccagctatgaattttcataattgtccctgggtcaagtctttatttcttcattttaatgcttgaagcactgtcaggacagactgtaaaattattcccggtgtgatgaaacaattttgacattcatgttatgagtgcttatctcacaagtagattacatgtgggattgaatgcgggcagaccataatatagcattaatgatgaaacagacgcaatcatctctgggtagaataatggaaactcatttgcctcctgtgaaattgaaatgactctgcctgagaatccatccttcagtaagtttactgagcgtgacaccttggctgagctctgggaaagacagaaagggcatgcagtttataaaatcagccaagggtaaaatgcttgtcaaactgtattgtccggaattttgattaatagtttatgtggcttcattaattcaaagttattctccaacatctgtatctgtcctttcttgtgggatggtggtgaagacttggggtttgttgtatatctgacttaggggccaacttttattttctcttttagtgcaattatgtggtccctgctacactggtcattatcatcttcatctgcttccagcagaagtcctatgtgtcctctaccaacctgcccgttctagcccttctgctcttgctgtatgggtaaggcaactctgagtggagctctccccccaggggacaaggcatatggtacccggtgctagagggagggcagaaggcgccagtggatgcttacgtttgtgtctcaccaggtggtcgatcactcctctcatgtatccagcatcctttgtgttcaagatccccagcaccgcctatgtggttctcaccagtgtgaacctcttcatcggcatcaatggcagtgtggccactttcgtactggagctgtttacaaacaatgtaagtgtcccattgggcagagcatgtcccattggctggcactctgggttcaagagagtggcagttgtctccaaccttactccacttgcctgtaacatccacaccactgacctctctgcttttgcaagctgtgtccatacatataactctctctctgtcctgctgtgccttgtatttctctggtcaagtctttctggttcctttattttttcatacttctttctccttcagtgttgctttggaaaagactgtgttcattctcttctggcttgctttcctatttaggcagcatttctgggcgatgccgttcatcttcaggcctttaccatcattgcaggttttcatttttatctctcagatccatgctttgattgtctcttggatctctgttctccagttctcacagcctattggatgactccatttaagtcatttataggtaccaacactagacacattgtctttcccactagaacctattggtcctcttgccatctctgtttacttggtgacatctctgcagtttctcatacctctcttggacccatccatttgtgttgcggtttatatatgattcatctgaattctcccagtttcaaatctcataaacaagactctctgtggcccttgctcagcacatagtgccttgttggctatatattactgtatcccctcccaatgctttaaaatttcagctgagttttcccttaaaccactatactcctgtaggtctgtcttgaaatgcccttcatttgtcatgggacctgagagtgtctccataccctttaagatttaagtctaatatgaagctttcctcatctgcccagtaagatataagctttcttttctctggaccatcagagccctcagttcttccttcagtgcagtgtaagcatcctccaggctctggctcagcacaaccagcaagtaacaactttgctggatcttttctatttttattatatgtgcattggtgccttgcctgcacatattatatgtactccatgtgcctgtagtgcacacagggcccacacgaaggcgttggatcccctggagctagagttatagccacctgtgagccatcctgtagatgctggggaccaaaccctggtcctctctaaccactgagtcatatctctagctccaggggcttgatatttaacaaaccttgtcttatggggtcataatacattctgatgtaattgagaagatggctttgaaattccaacagcatgctgaaactcggatgttcacctagataggagtgagttgctttaaaaatgctaagccaatgtttcattgtggatttgtgtctggttaaaagttaccaggcttagaggtttgtttgctttcaaacactatcgctgcagagttcctgaggaaaatcccgccgctgttcactggtatctgcatccacaggtccaggacgtcagatgctttgcttcaagtccatattttagactttgatagaattgtaatgtagactgtaagtgatgtgtgtctctccctctccctccctctccttctcatctgcagaagctcaatgacatcaatgacatcctgaagtctgtgtttcttatcttcccacatttttgcctggggcgagggctcatcgacatggtgaagaaccaggccatggccgatgccctggagaggtttggtgagtaaggcagtgggaagcttcgatggcggtgtgacagttttgtaggcatcggcactctgattgctgctttagaagggggactgggtgcaggccatctgtcctcccaactgtcatgggccaatgccaacacagctgctctgtctgtcatgagtcccaccatataggtgtgtattcgtgcctctgatagcactgagataaatggcgggtgtgggggggggggttgtaaacaagaaaatcctagcatttgtttgagataaattcctaagctcactactggtgagcttgtcaaatcactggaaaaatcaagccacagctttggcaagtaggtgaggctggagattaaagagagagagagagagagagagagagagagagagagagagagagagagagagagataccctttgattctactaagaaaacctgggcctgcaggtgtgctcatatattgtgttttatgccttctctaaagagataatttattgaatctttttttctacttttataatggttaaaatatctctgtccattatgtgactattattcatttgctgattaattgagttaattaatgctacttaacaaacatagaagaggaacattttcagtttagtgatacagaggagacatgaagaattaagggatattatcctaaaaccatctaacttaagtcactaggttacattagatactgtagaaatagacatcttttgaatgcattttctaatacccatactttctgaccccccccccaaattatccaggattattggtcaacccaaacttgaattgtttgggtttgggtgggggcatgtctcattaaaaaggaaatcttatcaatcctaatgaacttacagatctaaaagctaattgactccgaaattctgacctgataccaggttgtattatagttttccaaatgaaatctcaaagtagacacctatgttactcctttttcttcttgtcatgagtcatgtttctagaaaaattgtgtgaaactgaccccccaaatgaggaaatcctttcttcctttcctcactttccttcccctccctccctccctccctccctctcttcctcccatccttccttttttttaatatgaaggaagtcctttaatatttcaagtgtgaaaaaaaaaaacgaaattttacgttaagctagcctttaaggtttagcataatattaactaatttaaatgaaaaagcatacaaacaacaaagtcacgcacagaatctcatctcagaaacaggaagtagggccatgatttctgatgcccgcccctctgaccagattatgtctgcattgtgtctcacaggggagaaccgcttcgtctctccgctctcttgggacttggtaggacggaacctttttgccatggccgtggaaggggtggtgttcttcctcattactgttctgatccagtacagatttttcatcaggcccaggtgagctttatctgagaactgttccagggacgtgatgggtgcagagaggactcacgagtcctgggtgggctgaactcgcccagttaaagggattttcccagccgtgagcatgctctgtccacccacgaagtgatggcgcggggccttgataaagtgctttagaagcttgaattttcccttggaaaagagctgaaaagattgacttttcttaaacactctttctcccaagacctgtaaaggcgaagcttcctcctttgaatgacgaggatgaggatgtgaggcgggagagacagaggattctggacggtggcggacagaatgacatcctagagatcaaggaactgaccaaggtgggcagcgactgtggaccccacagcttctcttctgttttctgcattttatctcctcactagctttctgctgaattgcttcattcatgacaacaaaacaaaacccggtgcttccccaaatgtgcctctacacaaagctttgtcagttttacttaaactacaccacggagacttcttaattaaaaaacaaaatcctactgggaatacttctgtaatgcagttcccactcttcagatttatttattgaacatacttgcattcgtgttagtgattaaaacactctaacattgtatgtcgagacaaagtgcagagaacaaatagttgattttgattttcatggctcaaagatcctctctacctccgttgctcagagagacaatctgcttcgaccctttctgaataccacgaccctcacattttagtttatggtgattgaaacattttattatagattccaacctacataatttaattttaaaatatatcactgtcttttaaggaaaaaagactcaggaataaaaagtttcagggtcagggaaaggctactcattgcggagacagagaaaggttcttggcacatctgtgtgtggtgcagccatccgatgagttctgttctgtggggagtgtggctttcagagccccttcctccacagttggctgggagagcccagagcctccaaggtgcatgatctctgtgtttccttggttgcagatctataggaggaagcggaagcctgcagtcgacaggatctgcatcggcatccctcccggagaggtaaatgcactgcgctcctgttgtgttttgtctctattaattccgaccctagctaccaaaccaaacaacagtgtcctgtaactatggaaaatggcttttcaaggcttctgtttttgtgtctgtgagaagcgatcagtcgtggagagaatgagaacctcttgtgtcagaacagaacaggtttggacgctctcaggcagtgtcagaaaacattcacatctagattacgccttgggggatccattcagggatgaatttcaagtagggtaaaatgtagattttctcctttcacgtattttttggacttcttttatgttcttagggtggatggtaggtatgcattttgaccatttggcttttttattgctctttatagatagaccttggtctcaacttgatgattcagtctttataaaaaagacccacaaacaacatggctcatacataaactctctcctctctccttctctccttccccatctcctctctgtcatacacacacacacacacacacacacacacacacacacagagagagagagagaggcaggcatacatgctctcatgatatctgaatatggaactcattggtacttaagagtgaagctctgggctccatggtgaagcacacccaggcccagggggctggttcgctaggccattcagactaagatttgggagtttgttcctgccgctcacctagtctcgcttttcagtgctttggactcctgggagttaacggagctgggaagtcaacaactttcaagatgctgactggagacacccctgtgaccagaggggatgcgttccttaacaaaaacaggtgggcaaagaagcagcctgtatttgctgccgaggttttctttctccagccttaagaaataaatgtacagttattttctgactatcttattactatagcttgtaaaagcattgaagtttcttgagttcaaaacctcttaaaatcatgtccaagttcactacctggaaataagcctgatttttacattttctttcagtttccctcttatttatccataatttacatacatatatatataatttccttgatctgagagaatagatctgtgatttttagtcaattcattgaattacatgatcacagccaagttctagagctatcccttggctccgatctgttatgcatctatatgtgccataacagagcacagctctatatagactttgagtctatattataaatagttttataatgaagattttacaatgggttacatattctaaaatctagaaactctaccaagtaaatatgtttatttgatcaattcattataaatgttgggcactaattagtttctctattcgctgtttaaatatgtccttgtagataatttctgttatttcctcagaaaattccctacatggtaaaagggcatatacctgttaaagtgccctctgtaaagtgtgtaacaattgataaagacaccattaagccatttactaatctttgtggataaagctatgtatcagagacctgttaggtggtattttcaatgtagtacatatatacagacacagaggtacacatacacctaatgaattaaaatggcacccacctactgttactacttgtagtttaccctaatagttcatacactagtgtgcatcatgccatttaaaaattgctggctgtgacctactaaatttatttcacaacctagtaatgggagattgctcacagttcagaaacattgactagagatagtcaatattattgtagagtcagaggcataatgaactcatccatcttctcctgtctcttactgacttatttttcagtagcaatctacaggagccttaaaagaatagaaattctgggaatagtgatgactccctagtctgtctagtaccaagctcctggaacatgtagagagacaataaccgtccatcctaaggtttatctcagctactgattacataactgacttggataatgtagctgtgagagagagccaggcacaatgtccatgggtaccttagttttaagtcttgagaaggctaacccaagaatactaaataagcagaaaggactgtacctatatgtcaagttcatggctatctggaggtgactgaaaggcatccatcagactggaatatgaatgtcacaatttttagataatagcaactattagtttgacaggctttttagaacctagaggttgcccctacggatttaagtaaaattatttatatgtgtattttttcctgttaacatattagaagatctataattaattaaatagaggaataagtggcagtctgcattgtatatttggtggaataagaacgtttggaacatgaatgttccaaatcagtaaatggggagcagaaggcagcaagaacccaggcccagcatttctgggacttacgtggtactgcatggtcttaaggaagactagagtatagagacacttgttacatatgaccagctcacagagtcagatttgcagtggaaacttaatgttgaagttccagattggtgtgactgagtctgttggcaaagcccatattgcagttgtatagactcattttgatgctggaccaagcatgcagggctgagacaggaccctactgatagaaagagttgacatcctagggacagaaaggttggtcctctgaatagaagccggtgtatatttgttctatacaagcatatatttttaagaactgtcaagccagattgtctcctcagaatatctctaaacacttaaaacctgactggtcctgtcttccttacagcatcttatcaaatatccatgaagtacaccagaacatgggctactgccctcagtttgacgccatcacagagctgctgacgggaagagagcatgtggagttctttgccctcctgaggggagtcccagaaaaggaagttggcaaggtattgtaggaaccaggaaagcagactgtcttttgacacctatatattgaataccttcttcatacatgacatcaacctgagactgtctctttactcacactgcagtctctgcactgacttcaggggaagggaggcatgcacaggctagagggcgggggcagggagtgcaggtcccactacataagtcccctctccctcctgtgagtcctcagaggtagctgagacttgagtccgattcaatgaaagaactttcctacattgtgtgtaagaaagcatggtgacaatactcagccagacaaaaatcaaaacgctttttaatctctctaggttggtgaatgggcaattcgcaaactgggcctggtaaagtatggagaaaaatatgccagtaactacagtggcggcaacaaacgaaagctctccacagccatggctttgattggcggacctcctgtggtgtttctggtgagtgtgagaggggtgtgagtgagtggagggtggaaattgttcttctgtcttgaatagacatcatggcttatctgaagtcacatgtaggcctttgcgtacttggcatggtgatagcaagtccatctgctggtccagagcaggcttctccctcacagtttctccctcacagcttctccctcacagcttctccctcacagcttctccctcacagcttctccctcacagcttctccctcacagcttctccctcacagcttctccctcacagcttctccctcacaggcttctccctcacagcacgctgggtggctcggctgtacctttacaggctcctgagtagacaagctccactcatcttgtttccttgccttagataatccctacaaacatggctgaaggtgaaggtgctatttgaatagtctcaggaatattcttcatgactctatgttgttcatcctccaaaggtagaagtgaggacatggcttctagatggacatagtagccacagatgaccatagtagccactgcatcatagttgctcccatacagatgaataaaaaccagaccagactgggcagtggtccttgatcctcattttgtagagaacactgggagtatgggaagaagccttgggttgaagctttaatttttattgaccatgtggatatgaaatttctctatgattagcaaatgtaatagaacaaggagaaaaatatgatgtaagtttcactgctctgacttcaaaaataattttggacaaaaagttttggggtttttgttttgctgttgttgttgttttgctataaggtttcactatgtagccctgggtggcctaaaacttcctatgtggactaggctgactttgagctcatagaaatccacatgtctcaccccacccccactctgggaaacccggcatgatcattagcattgaaaaaaaattgtcttgggctggagagatggctcagtggttaagagcactgactgctcttctggagaccctgagttcaattcccagaaatcacatggtggctcacaaccttctgtattctgtaatggggtctgatgccctcttctacagtgtactcacatatataaaatagataaataaatccttttaaaaaattgtccttgacattttttttccagcaaataaacttgttttattctaattataggatgaaccaaccacaggcatggaccctaaagcccggagattcttgtggaattgtgccctaagcattgtcaaggaggggagatctgtagtccttacatctcataggtctgtactgtacaatcttggcttctgtagggtgctattatatctggtcattttataaaaatgaaaaaaacaaagacaaagactgaaacagctatcacctggaattattccatctagagataactattaccatttgtctgtatctactccagggtttttcttatgcaaagatataagcacttaagtattttacaaacaaaaatttaattataacataggtactgaaaacaaaatttcaagtcatataattgaggtgtgccatcatgtctcgcagctgcattgtcatttgtaaagatctaccctaatttatgcaactgttcttcctgtaaacatttgaattatttttccctttttacaactgtatggcacatgacagaaaagatctattatttctgtttcatggcaaggtcctaggataatgggggtctgtttcattgaaaggccaggtttcatagtgatactctgatgcttataggagcatctgtttgaaaggaaaacctcattctgtttccccacagtatggaagaatgtgaagctctttgtacaaggatggccataatggtcaatggaaggttcaggtgccttggcagtgtccaacatctgaaaaacaggtaacggggaccatttctttgggatagcacatactgaagtcattggggtttttgttttgttttgtgtttttatgtatttatgtatgtatttatttatttatttgatgtgtgtttgcatgatagcttaaaataaaaacagaagagtataggaaaaagaacacaggctctaaagcctaaatgggcagtattccatttgcctttgccctgtactggctggctgtgcgatttgtaggcaggttactcagcatctctgggagtcagtttctgagactattccgaatttagttatataagtgaaacttaataattcacttgtgatgttatgataacaaggacacactgtggaggtaacacaaagaggtttatatccttaccctgccgtaactgggcgttaactcaaggacatggacaggtgactaaattccttgggcttctgtttgtctctatgtcagacttcctaggtccacattgaggttttaatggaatctcgtattcaaggctgtgagctaggtaccatacacagctaggtattcggtagataaaactggttctttctcagaaactgctccgtgggtctgatgtttttcttggtacaagttggggttttcagaattgagtatcctcttgagtagtttgctacgaatgccccatttgtgtgtgtgtttgggtttttgctttcaggtttggagatggttatacaatagttgtacgaatagcaggctccaaccctgacctgaagcctgtccaggagttctttggacttgcgtttccgggaagtgtcctaaaagagaaacatcgaaacatgcttcagtaccagcttccatcctccttgtcatctctagccaggatattcagcatcctctcccagagcaaaaagcgactccacatagaagactactctgtctctcagacaacacttgaccaagtaagctttcagtgaaaagtacatttagctacaggcttgggatgcctgctcctttctccccaccatcagcttgagagaacttcagcctgtgctttgattccattcctgctattactgcctatattatacagatttctgtgggcacatgcaaaacgttgatgctttctactatatataaattgtgactgtagtaacagtagtcacaataactaccattgattacctgtcatgagtcaggcattttgccagaagcattctctcttctttttttccttttttcttatcattttttattagatattttcttcatttacatttcaaatgctatcccgaaagactttatctcttctacataacaagatatcctgtagcagtaatctgtgaaactgctctgaggtcctagctgatgatcacatttctcgccacccacgagagttctctggatcctcgaaataaaagacacaaacacccgagttaattttaatatgccctcactgcacaaggctgggcttctccctgacttcatgtggctaacccactctcccctctgatattccagagttatcaccttttaaaatctatattttatctctactgccccagacacacctgggggattggcctggggatgctttcctgactgccccatggctggataatttctgtcctgcagctcttagatctgacctctctgcttccccatcacggtcatggtgattctgaccctcctccttcccttagtcctttgtccaggaaatctaaaattcccacctccatctccctgcccagccattggctgttagtaactttattggccaattaaaaactaactggggacagggaccttcagcaattggacgtgtatattcctgtgtgattgtgggagccaaattaagacaatgcatgagaaccaatccccagcaatataccagacagagcttggcagttagtaggtatccagcaagtattttttcatttcctcttaattaatcctagatatgctaaagtggatgattgataaatgggtggtttaaatagttagtgatgtgggtgatgtagaaaaggatttcaatgcattctgtgcttctcgagagctctccctttcatgggggatttctccttcaagtacttactcaattctgtgttctcctaatctcaacacaaggaaaaatgccaccataaataaaatgcagctacaacaacaaaagattcagtgcagaggccttcatgaccgtctgtcttccttttgccaggtatttgtgaactttgccaaggaccaaagtgatgatgaccacttaaaggacctgtcactgcacaaaaaccagacagttgtggatgtggccgttctcacatcctttttgcaggatgagaaagtgaaagaaagttatgtatgaagaatcccgttcacacagggtgaatgaaaggaaggaagagcgaggtcttcctttgcactgtgtcaagtgttctagaagaaagcgtcctgcgtttctgtggagaagaacaaactggatactgtactgacactattcaatgcaatgcacttcaatgcaacgagaacacaattccattacaggggcagtgcctttgtagcctatgtcttgtatggctctctagtgaaaatgacttgaagttagttcattaccttatacagatgtgaaactctggtgtggaaccaagcagactctgggtttggattcatactttttttgttcctgtgtattctcactaggattgcaacaacagtctatcaaatagtcatggccagtgataatcaaagtcaaaggcacacacatcctcgtccattaagccattaagccatgctgaaccacaaaacaggtttcccggtgacacatccattgctggcaatgagtgtgccagagttactagtgccaagttgctcagaaagtctgaagcactgagtgtgtcacaaacacttttgtgaaaaccgccctactgtcggttgacatcattaaatatcaggtgacaaaaacggtgccacatgtgactaaatccccattttccttctctctttgatgagctgctgttgtggctgtcttgtacaaaatgtgcatctctctaacccaggtacttggttctcttgttcagtgttgcccatgcccctgtcatggcttgccatagcatctttctgagactttttcaaatacattagatcctcctaagcagcaaagattagcagccaaactgctggggctgcaagcggctcagttcagggtgtggcatgaaagatccagtgcatttacacgtggcaggtctgggttggtttgtgctgactgtctcctaacacaagatgggtacactacaccttgagatccttcattatttaacagaaatctagttctttctaactgtttgaattaacctagaaaatgaaagggtggcatttcattttgacaaaaatgtttgcattgttagtattatttggaattttaagttttatcaatgcttctggaagcttagaactgtacacgtgtgatgtcagtcacatagaggaatgtgcccggactgcctcatgcctttattttccttggtaaatttgaagatagaatgtctgactagcgcagtgaccagaaaacaatgtggtagtcaacatctcaggccatattttaagatcctgtagagcactattcatttcaggttgcagatggagtatttttgaaacatcattactatgtagatgcttggataggagtgagggggagctagcagatttcctgtgccatttattcagctgattgatgtacagatgtaggtttattttgtaaaatccactgaaagaatatggccacacccttgcctacttgatagcatcaatacagaagccaagaaggaccactaagtaaccccctcttcccagggagagcagctagcttgaaatctctcggatacaatcgatgcgtctgacctttgggatcctcaccatatgggcaaacaatgggctttgcaggatgagagacacccacttaaacctctgacgatctcgaatggttcatctcttccgtcattaaccagtcatggaaaacaatcaacaaactctgccacgtgaaatattttttcagacttttctaacccaagcttaatttgttttcatctgcaagcaacgtggaaaaaaatagttatttcaccagtgctcaatgtcatccgtcttcatacaaaacaaaaatatgagtaagttcctgtattgggcaaagttcaagtgagcttttgctatccttatttaacttcttctaaaaatttggaagaataagatttcagatctatttcaaattatgtttatataatgttatgtaattcattgcttgaaaggaaaaatgacaagtttgatactaatgtcaacataggtttctaaaatgataaggaaagtgtgtttccagtagttattggcataccattcattttagatatcaaagataccgaaatcaaagaagcatgtctttatttttcaaaaacaaacttccgttggctttctcagtccattatcaccatgtacagcccttagaaaaatccttgttttaattactcagatttttgaggccacaaaacaacaacaaaagtaaggcaccatttttgaaaacaaaatcaattgagtgtagatttaaaatcttttctgaagctagagacaatctgtagctattatgttaccttttacactatctgaagagcaatcttcaactttcctgtttaaacgtaattattttagaaagttaaaaatcaatcctatcttcaaataagaatttcttagattccctatggagatgtgcattgtgagttgagaaattctcaagtgcaaacacttctggtttactttaaaaaaaaatagtggaaaacttactaactgtgaatatgagaaagacaaaagaaagtgagtcctctcgctagatatacctagcataattcattatgaaacaaacaaacctcaaactactgtattttggtgtctgtaccgcaagcatatgcctcatgactataaatgttacatacatcatttgctctctgtatagtaggcattgacttaaagggattgtttgttgtcttctcatggttgtatatatcaggtaaaattgttccaaagagccatgtgttatgtaatggggaaccactttgatactgaattactaatttgtactttcattactatttgctggtaatagtgtaacgccacagtaatactgttctgattcaaaactgttgcatccctttttgtagaacatttatatttccataaggattcggtatgttcttttccctcctgccctaggatgaagctggttttgtgctttttctttatcattggccctcattccaagcactttatgctgtctgtaatggatctatttttgcactggaatatctgagatttgcaaaactagacaaaagtttcagagcagatttctaagttaaatcgttttcattaaaagaaaaaaaaactgaaaaaaattgtattgtgaataactttatatgacgtgtttttttaaaagcttgtttctatgttatgagtcacaaaataaagctgtgacagtcctgctggtctacacaaagttccttttgtgcatccgtagcaccacctgctgtttaagtgttataaggccagagaggaagctgctctcatcgctggtgcaagtgtcagggaaagttcaaatgttctgaagaatggactcggggtgctacttcaaaatgaaagaagcttgtgtcctttctgatgcctttgacatttatagtgactgagtagccactataaatgaggggtcagaagctttatagatggagtactggttgctaatcactaagctgaagaggaggcagtataagtaggcttccgtaatgaggacagagctagctttgtggaagctacagaaaggtaactttgggtgcttagtcaaccaaagctacaaggacacagcatcatatgcatcgctgggggcgagggcaatggtcaccaggcccaaggagtagacatttgggaaaaagatatgatgggggaggcactggggttcgtttccacctttctctgcttccagaattcagtgctaggctaagtagtgtacacacaagcagggctctgttgagacagtgaagatgtgtatggcttatcagcctcagagaaaaaaatacatactgaaccttgtaactcaaaaagccccagttggtcctgggtctatagtgactgcttcagaatggctgggacaatgtgcagtaagtggtccttatccagggcacaggtcagaactttgtatgcaggttcttggcttttgagtaggcctagaagcctatctgctacacaactgtatcttctagagttctataagactttaatgaaataatgcaaccatgcctgtgaaaattcataattgagagtaaaaaaaaaaagtatcataaaaggttagttaacccagatgaaaatacaagttacccacaaatcttgaccaaaatattgattaaagccctctctaacgctccagattagaaacccactctgggccatatggatagtgctatagcatgtattaagtttcaaaaaacaggggagaaaattagcaactattttcaacttgccagatactggtaacctaccctatgcagggggagtcaagacattttacacgttgaataaatgatacctcagagaaatttgcctcaagatacaaagctaattaaacaacaaatggtgcttcctttgaagttaggtgtcagttaaacttgtccttggtaaatgcactaagcattgttatgtattaatttggcaaatatttactgagctttgaatgccggccatccatcctgattcaggggatgttatatcgaatgaaatcaaatttatctttaatgatgcattggtgaagggcaaatgacagtggacaagctttgaagaacagaaaacactgtgggtgatgagttaacagtggggaggagtcagaaacagcctgtctgaggagagacacttaagctcagttctgaacaaaatgagcaggggcggcagtggatggtgggcttcgagaacacaccttaaacatggagtataaaaaacacaattgggaaaatgcttggctgccaaggaagaagaatccaatctctcttggtcagggagtgggggatggaatcaggatcttgctgcctcgttgagttgtctttcattgttaggatagtgaagaacctggaggttttccacagagtaacgggcatggcgagcatggtgggcgtggcctgatctaatccctgtttcagagaatgtggtctttgatgggaagaaagggcagtagaagagggtgaggggacagtgaagaggtcagggaggaaggatgtcagtcagaatctaattcagagccagtagcatttgctcacaggccataggtaggggtccaggaaaagaaaaataaaaaatggcttctagtttgtgaactagacagagatgcctatgttgaagcatgtggcagttggtattcagtcgagagctcaggggcaatgatggaaagtaaaaatggtcacgttaacagcacaacacacacacactacacacacacacacacaccccaacacagttgttttgattttttaagtcatgggactggatgagcttacttacctgaagagaatgaacgttttagcctgagatttagaagttaccaaaggaaactgggagggaatgggcagtaggaaggagaagaggcacaaacgtgtcaaacactagaatgtgctcctgggagacagaatgctacttaggtctgaaaactgccaagtgagcaaggtcactgtgtgaatgaccattggacttcataagacggtggttcctggagaggctcttacagtcagtggactgacaggacaaatgagaggtaaggaggaggaatagtgaatgtcattgactctccaggccactgtgctctgaaggcaacagacagagctagattgcttgcttgtagataccagttgggattctccttttcctttctggctgtttttaatcctttagccatgtatactgccaggagcctttttttccaccagactcccttaccacacttggtctcacttcttcccttacctcagggtcttgggccaattagttgaaactaaagaaatcaaaccccatattcctggaacaacttgcttctttttacgaagatgagttgagagagacctttccaagtaacagagtttatgaagaaagtctctctaatgagtctttggcttctttgaacacgttacaggttcatactcctttaatgactgaaagtactacaacttcagtttccacagtagttaagtgtccaggctttactcagtagattagcaattgatgctgggaataaagtccagcctgtgagtctgcaaacaccaattttcttatcttttggaagttatttagtggaggacagattagactcaataggtcgtatatctgtttctcttcctagaaatacaattgctgtgtttttatagtctagaaagtcatctcagagccaataggcaaaggttgttcttgatcacactcaaggtgagaatgtttcctttgtccttcactgtgtctctcatagatcctttgcaaagaggtgacaaggaaccttcaataattcattgataatagaggacaagatgaagtatgaagcaatgatgtgctatttttaatgcgaaaatgattgtattcatctatattctgttgtcaaaatagggtggaaagagaagggaagagagggagagggagagagattaatttagctcacaacttttcaactttggaggttgaaaattgaagaacaggtggtgttcatggaagatggcatcatggtgctagcatgtgcaagatggagaggtcacacagcaacatagagaaatacaaagagatccaggagttataaacaatttgaatgtagtgaactgttccccacatacatgtttgaatacatggtccctagctgatggtactgtttggggtaacattaaaactttgaggaccatagcaaggatccactttctgtccaggtcttgtttcataatctacccagatatgaggaactctagctgtatattcccacctccatgaattgttatgcctcccctaccatgagggactgtacaacttaaaaccatgaactaaaataaacccttccttccttgtgtctgtcaggtgtctggacatagcgatgaacaaagtaaccaatataactcaatttcaagagaaccaacatgggtcccaagaatattacattaaccctttccaaaactggtaccaccaaagacctaactaaccacttgccactgggccccatatctcaaaggtcccatcatcactgtaaggatcaaactccagcacatgaatctttgggagagggtgtcacatgcaagctaaatctaagatatagcacacctcatatgtgaatacaatcaataagtgcttgctaatgacttaccagatgccaggcactgattggtgatactgcagtgattcaaacaaacccccatgatatcatggattttagtttctagtggaagaatacaataaaatcacatataactaaaatagtaaaatgtttgttatgctaataagtggcatgatgtcaactgcgtagcctaaacaacatttatttcttaccactctggaggttgggaaatctgagatgaggatgctaacatgacgacaactagcaattaggtttgaatgcatacctcattggttaactcacatggtagagatatggagagaatacttataaagaacactcattctaagagctcatccccttacataaacccaattacctcaagtgctgatttgaataagaacggccccagaggcttatatatttgaaagcttggtcaccagagagtggtattctttgaaaggattagtgtgtcactaggggtgggctttgatgtttcaagggcccattccaatctttcttgctgctgcctgcagatcttgatgtagaactcagttccttctccagcaccatgtgtgcctccctatgtgccaccgtgcttcccaccgtgataacaatggactaaacctctgaaactataagccagacccaattaaatgttgtcttttataagacttgccttggtcatggtgtctgttcacagcagtaaaaccctaactaagaagttggtaccaggagtgaggtatcactgtgataggcctgaccatgtttttgtttggacttttgatttggaaagcattggaatactttaagtggggcttaatgggctatcctactaagaatatggaagactttgttgctgagaattctacatcttcatctaaaggctgctagtggaagactggcttccaggaagctaggatgagggccttaaagcccacacccatagtaacacacctactccaacagggccacaccttctaattatgccactccctgggctgagcatatacaaacaatctcagaagggttgctgtggtcacggtgtcttttcacagcaatagaacactaagatacatcataaggtctccacctctaaatatcattacattcgcattttgaagggggaaaattaattccatagaaaacagggattttgactttaaatggggctgtctgggacggctgaatcaagctcttggataaagatcccaataaagtgtggagatgatccaagaaaatccatgtctagggacaaagatcctaggcaggggaaatagactttatggcaagacaataagtcaaagaagaaaagctggtaagacacctgaagccaagagagtggaatgacactaaagaacataacagggggacagatcatgtaatgggcttgcaggccacactgaccctaagggagacaggaagctatcagagacatgagggagtagagaagtgaattagtgtggttcgtgttttatattcttctggttgctgtgttgaaaatagattaggatgatggcaggtcagtgaagagctgtcattttaaatccaaataatgatgaactcaaaccataatggcggctgcaggaatgtgaagcaatcaaattctggacttttgggatttaatgataggtatgtaatggggtaatgacctgaaaaaatggacaggaaaggaggtgtcattcactgagatgggacttcccagtaaagactaagggtttagctttcaacaagtgtgctgtgaagtttctaatatattcaggtggagatgctaagactggcagttacgtaaggctgaattctagagaatgcatatatactttaggaccgtctgaatacaggtgccagatgaagacgtatgactgagacataatccaggaagtgggtgcaggatagaaaaaaagtctagggagtcagttctggagtgtgacatcattggagatgaaggagacaagatagagaccccaaagctaagtaaagaagactaagaagatggtgtttgtgggaatgaaataaaatctagaacaaaatctagaaaaaaaaatctggaacaaaaaacaggttaactgctaggaaatcttctaaaatgagagctggaaagtgagtttggtgagagctgtttggcttgtggggtactgagtcattaagagagaactaattagaggctggacttacgacccttcttttgtgttactacagggcaggatgattttgttttttaaagatggaataatcatatttgtacgctgagaaggactgagaactggaaaaagtagcttcaggagacagaatgttctgtggctatttcctccagtaggagtggacaagctggtcttccccagctgcagagtaggagaaaaagtagggcatggggacctgcctgcaggcagtgacagggagtgtcagtctgcactcgattctgattactttcatttgcttgcttgttttcagaaaggaagaaggttcaacaagagagaatgaagaggaggagcaagtcctgaggacaatctaagggaatggaaggaaatcaagttgcaaacgatctatgctactatgtgaacctgtgcatattagctatattcttcttcaaccctcttgcaaggcacatctctgttaagttccgtagaaagtgaaaatgcagttggagctaaatacaagtaaggtatatatgatctaaacgaagcaaataagtatatgatttagattaaggagaacgggtaggataatgcctagtgtatccatcaaaaagatcaaaatgtcagctcttaacttttactttgctaagtaacggtcaaagaagattgatgctcaaaaagttaacggagcaaaaacacttttggtaatgttttatattgagctgagtttggcagcagccactggcacctgagggaccttgtagcttgagactcatagaagctccgaggagagacacagtggcagaaggagagtgaagatcctgcagtatctccagaacaactttgaaaaaggcaagtcatatgggaagatgcttttaaagagcagagccccatctagtgaagtatggcatctgggcagtcatgagatcacagacaaagaacacgtcatcgctgagtagggctaagctgcaggtgctgctgcagtctgtgccgcttgccctgatgtggggaggagaggcagcgctgccagcagccatataggtgagcctgtgcagcagccagcaccaagagcagagtgttgtgcattggcctggaatctctcatctctgccccagttccaagggtcacgctgactctagataacggcaggatatctgagaggaatcgcagctagagtccagtatttatggtgcttcagaaactgaaaccttgaacgagaccaatgactcgttgcagttaagtatttgtatacaaagctgtttgggtgggaaaaaaaatagtgtaacacactgcagtctgcagtgtcacttcggtgattaaatgtgccacggagaggtgggaaagatgactgagctgagtgacatgatatggagaggcagagctagagacactgtggctgtggtgacaagtgtggaagcgaagctgtagcggacctgggaagaggccattgctgagtagggctgacagcgtgatgtgtagcagctttgagcttgtgcccactctgccccagaatgtgctgcccagtcatatgactgccctggctctgggcagtgacagatatctgagatggagaattctggattctgcttcattttctggattgggcctctttgaaaggccttcatggtctgcgctgttgctggaaactggagaccacattggtgctcatggtccatgctgctgccagggccatgttgatattcatggtttgtgttacaataggacaccatgcttgtgtccatgatctgtgaccactcctttccgctaaaagaaaagaaaagaaacagtatagagaggaagccattaaagagtccttgaaaattgtgatagggatgatgaagtatatagctcttcagagctcacggagcagaggaggagggaggcctctggtctctttaagggcctggccactcttagcttgatcatgctctgtatcaggctccatactatttgtttttcttttctcctgtctttggggagggcacaagggtgggagggtagacctgggaggaatgggacgtaagtgtgatcaggatgcactgtgtgaaattctcaaataaccaagaaaaacataatgtttaaaaaaacattgtataaatgaaagctaaatttttaattaaatgaaaaaaatgttcattatgtgcatttgggcttttaacaattaaaaaattcattgtatacattcattgcatatggtattatactaaggaagttttcacacaagcacacattgtacagtgagttatgttccctccatcaaacctctctctccgtttcaccacctctactcccctctgttaccatagacatagttttgtttttactttcattttatatagacatacgtgattttctgtgcatagaaaatctagggaccacatctgagggacacatacttgtcgttctgagacttgcatatatctgaaatgtgtatgtgaagcacataccaagctacagctgtgtcacataaatgtgacaacgttctgagggctgcccaaagagtgcccgaagagtgcctcgatggatgcgacagtccacagcctgccttcctgagcagcatctcacaatgctgacagctgagacagcagtggtacagaagctcgccctcagagccagcaagcatgctattccactgtgtacttaacagcgacgaagctgccacactgtcatgatgtcattactccatgtaatacaggaaaagctccagaaaaagaagagataaatatagaagactcacttgataaaaaatcagaatgaatgtgaaggcttttattaggtcagagatttccattttctcattgaaataaataagtgtctcataatatttatgagtaattcaaggtaaagttaaaagtagtacaagcaattaaaaacaaacacactaagaccgtattatacaccaagtctcaaggatatattattttccaattttgacttaataatgaatgtgaaaccataattaatacttttctaaagtataaagacaaatactagatttaatatttctataaatcccacttattatcacaaagaaaggattactggtaaaaaatagttttaaatttcaggaaaaatgaacatgataaaaaggcagacattgtatttatttaatttacagatactttgagggaaaaaaattcaaaatcatgtttgaatacaagacttagtcataaaaatctcagaaggcaagatattgtgaaacaatgaagtaccagggcacggagtaacaatgctttctgatatccagtagttatgaaaatgaacagaaacatttcctgaactactcgtagtaaatgactcaggtagccttcaagatgcagaggtcacagtgtaatagctcagcccgtccttcagacaatgaactgggcgactccatcttggagacaggaagtgcccgctgtggatacagctcacctctgtgatgggatgctctgggctgggtaggaaactacttcagtggtgaaaatgatgttggaatcaggaacgtattctgctgggactctaggtaactgacactctcccgaactggaaagacatgttagaagacaatgaagttctcagcggaatcaaatttattctaaaaataattcaagcctaatcaatcagctcaccagcagccaccactctagggtcctcgtgagaccagtgtctcccagctgctcggctgtctgcactctcgttccaccacagaacatgaactgcagaagtagatcataagttagctgtaattttcctcataataataggcatttctttcatttttgagattatattatatccattctcccttccttttcttcctgccataccctcccacacaacctccttgctctctttcaaattcatgccctctttttttattgttgtctgcatacaagttcatgtggtacgtgtgtatatgtgtactatattctagatacaatctttcttgttttaagatttatttatttattttatgtacaccatcattgtcttcagacacatgagaagagggcatcggatcccattacagatggttgtgagccaccatgtggttgctgggatttgaactcaggacctctggaagaacagtcagtgttcttaactactgagccatctctccaggccctagatacaatcacacagcaggtaatttttataaatgtatatctatattttcatttacaaacaatacctttactccaatattatttttctgaaataaatcatgagatgtttagaaaaatgatgaaaagaattaaaattttttaaaaaactcttccagtttctaaacaactgttatcctgtgaaatagctccaaaaggtattagcaatcacaataaaaaataagatacaaatcagtgttttcatacctaacaattaggaaaaaacactcaaaattaaaatcaatgttaaaaaaaaaaaccaaaaaaccaagaaacacaggcaatcaccaacacccatcaattacagtctcacagaaatagacagctgttacctctgttgagggctccatattcggtgtggaaaacaccaactagtgtagagtagccaagctccacatgggcatttactgcccttttaaatgcattaccccacagagctgggccgccaggcttcatctgaaaggtagccagttcatagactcctagaattgatagaatcaaataactaagtaattactcaacagttactctttagtcaatttgctttgtttgactcttgggagtgggaagttactatgtatataatatatatgtacacagacagacagacacatacacacccacagacacacacagacatagacacagacacacacacatgatctgcttaaagggtcatcctcctggagcagtgattgaggaaatggccaaccaacgactgacccaacttgagccaccccatcggagagggagagagcctacatctgacactattaatgatattctgctatagttgcagacagggacgtaacataactgtctcctgagaggcttcatgcaacagctgcagggacccacagccaaacattaggaagagctcatagagtcatatggaactgggttccccaacaactggagccaggaccatctctgactcagactctgttgcctgcttttgcatccctcttccctagctgggctgccttttctggcttgagtgggagaggatgcacttggttctgatgtgacttgatgtgccagggcgggttggtaccagggggtgggcgagctccctttctcctcagagaggggaaggatagaatggaagactaggggtgggaggatgggactgggatgagagggaggggggctgatactgggatgtcaagtatataaataaataatgaaaataaagggtcatctgcagatacagttttatgcagatgcatttgttaattctttgcattatttttccttgtttttatgttgagacgttcttatctatgtttaaggttaaccttattaactgaggggtaacaaaagctatattacattaaatagttttaatctgggaactttatcaatgtaccagatattgatactttatcacaaaataggattttaagctgcgtaggtctataaggaaagaaataagtatctcccaatcttatattttttcccccttcttttcaactctgagaggggagatactattctttgtgtaatttcctcctttgagagtctattcctaacaagaatagcaaggaaacagttggcctgaagtcatatctgacttccagggaaaagaagctcagcatagggttttagtgttcttaaatatccaagtattgtttgagaggcttttgttgttgttttttaacctctagtcagaaatataaagcagaaataagaaactggaggataagtagatctgatagaaaaagaacaaggccatgaaagaattatgaaaaatgtagaagaagaaaataacattgaagcctagtgagagggctcagtgtgtaaaaatgcttgttgccaagcctgacagagctcagttcttggaaaacatacaaagttgggaaggaaccaacttcc

SEQ ID NO: 614 - DNA, 153107 bp, Mus musculus
ggaagttggttccttcccaactttgtatgttttccaagaactgagctctgtcaggcttggcaacaagcatttttacacactgagccctctcactaggcttcaatgttattttcttcttctacatttttcataattctttcatggccttgttctttttctatcagatctacttatcctccagtttcttatttctgctttatatttctgactagaggttaaaaaacaacaacaaaagcctctcaaacaatacttggatatttaagaacactaaaaccctatgctgagcttcttttccctggaagtcagatatgacttcaggccaactgtttccttgctattcttgttaggaatagactctcaaaggaggaaattacacaaagaatagtatctcccctctcagagttgaaaagaagggggaaaaaatataagattgggagatacttatttctttccttatagacctacgcagcttaaaatcctattttgtgataaagtatcaatatctggtacattgataaagttcccagattaaaactatttaatgtaatatagcttttgttacccctcagttaataaggttaaccttaaacatagataagaacgtctcaacataaaaacaaggaaaaataatgcaaagaattaacaaatgcatctgcataaaactgtatctgcagatgaccctttattttcattatttatttatatacttgacatcccagtatcagcccccctccctctcatcccagtcccatcctcccacccctagtcttccattctatccttcccctctctgaggagaaagggagctcgcccaccccctggtaccaacccgccctggcacatcaagtcacatcagaaccaagtgcatcctctcccactcaagccagaaaaggcagcccagctagggaagagggatgcaaaagcaggcaacagagtctgagtcagagatggtcctggctccagttgttggggaacccagttccatatgactctatgagctcttcctaatgtttggctgtgggtccctgcagctgttgcatgaagcctctcaggagacagttatgttacgtccctgtctgcaactatagcagaatatcattaatagtgtcagatgtaggctctctccctctccgatggggtggctcaagttgggtcagtcgttggttggccatttcctcaatcactgctccaggaggatgaccctttaagcagatcatgtgtgtgtgtctgtgtctatgtctgtgtgtgtctgtgggtgtgtatgtgtctgtctgtctgtgtacatatatattatatacatagtaacttcccactcccaagagtcaaacaaagcaaattgactaaagagtaactgttgagtaattacttagttatttgattctatcaattctaggagtctatgaactggctacctttcagatgaagcctggcggcccagctctgtggggtaatgcatttaaaagggcagtaaatgcccatgtggagcttggctactctacactagttggtgttttccacaccgaatatggagccctcaacagaggtaacagctgtctatttctgtgagactgtaattgatgggtgttggtgattgcctgtgtttcttggttttttggtttttttttttaacattgattttaattttgagtgttttttcctaattgttaggtatgaaaacactgatttgtatcttattttttattgtgattgctaataccttttggagctatttcacaggataacagttgtttagaaactggaagagttttttaaaaaattttaattcttttcatcatttttctaaacatctcatgatttatttcagaaaaataatattggagtaaaggtattgtttgtaaatgaaaatatagatatacatttataaaaattacctgctgtgtgattgtatctagggcctggagagatggctcagtagttaagaacactgactgttcttccagaggtcctgagttcaaatcccagcaaccacatggtggctcacaaccatctgtaatgggatccgatgccctcttctcatgtgtctgaagacaatgatggtgtacataaaataaataaataaatcttaaaacaagaaagattgtatctagaatatagtacacatatacacacgtaccacatgaacttgtatgcagacaacaataaaaaaagagggcatgaatttgaaagagagcaaggaggttgtgtgggagggtatggcaggaagaaaaggaagggagaatggatataatataatctcaaaaatgaaagaaatgcctattattatgaggaaaattacagctaacttatgatctacttctgcagttcatgttctgtggtggaacgagagtgcagacagccgagcagctgggagacactggtctcacgaggaccctagagtggtggctgctggtgagctgattgattaggcttgaattatttttagaataaatttgattccgctgagaacttcattgtcttctaacatgtctttccagttcgggagagtgtcagttacctagagtcccagcagaatacgttcctgattccaacatcattttcaccactgaagtagtttcctacccagcccagagcatcccatcacagaggtgagctgtatccacagcgggcacttcctgtctccaagatggagtcgcccagttcattgtctgaaggacgggctgagctattacactgtgacctctgcatcttgaaggctacctgagtcatttactacgagtagttcaggaaatgtttctgttcattttcataactactggatatcagaaagcattgttactccgtgccctggtacttcattgtttcacaatatcttgccttctgagatttttatgactaagtcttgtattcaaacatgattttgaatttttttccctcaaagtatctgtaaattaaataaatacaatgtctgcctttttatcatgttcatttttcctgaaatttaaaactattttttaccagtaatcctttctttgtgataataagtgggatttatagaaatattaaatctagtatttgtctttatactttagaaaagtattaattatggtttcacattcattattaagtcaaaattggaaaataatatatccttgagacttggtgtataatacggtcttagtgtgtttgtttttaattgcttgtactacttttaactttaccttgaattactcataaatattatgagacacttatttatttcaatgagaaaatggaaatctctgacctaataaaagccttcacattcattctgattttttatcaagtgagtcttctatatttatctcttctttttctggagcttttcctgtattacatggagtaatgacatcatgacagtgtggcagcttcgtcgctgttaagtacacagtggaatagcatgcttgctggctctgagggcgagcttctgtaccactgctgtctcagctgtcagcattgtgagatgctgctcaggaaggcaggctgtggactgtcgcatccatcgaggcactcttcgggcactctttgggcagccctcagaacgttgtcacatttatgtgacacagctgtagcttggtatgtgcttcacatacacatttcagatatatgcaagtctcagaacgacaagtatgtgtccctcagatgtggtccctagattttctatgcacagaaaatcacgtatgtctatataaaatgaaagtaaaaacaaaactatgtctatggtaacagaggggagtagaggtggtgaaacggagagagaggtttgatggagggaacataactcactgtacaatgtgtgcttgtgtgaaaacttccttagtataataccatatgcaatgaatgtatacaatgaattttttaattgttaaaagcccaaatgcacataatgaacatttttttcatttaattaaaaatttagctttcatttatacaatgtttttttaaacattatgtttttcttggttatttgagaatttcacacagtgcatcctgatcacacttacgtcccattcctcccaggtctaccctcccacccttgtgccctccccaaagacaggagaaaagaaaaacaaatagtatggagcctgatacagagcatgatcaagctaagagtggccaggcccttaaagagaccagaggcctccctcctcctctgctccgtgagctctgaagagctatatacttcatcatccctatcacaattttcaaggactctttaatggcttcctctctatactgtttcttttcttttcttttagcggaaaggagtggtcacagatcatggacacaagcatggtgtcctattgtaacacaaaccatgaatatcaacatggccctggcagcagcatggaccatgagcaccaatgtggtctccagtttccagcaacagcgcagaccatgaaggcctttcaaagaggcccaatccagaaaatgaagcagaatccagaattctccatctcagatatctgtcactgcccagagccagggcagtcatatgactgggcagcacattctggggcagagtgggcacaagctcaaagctgctacacatcacgctgtcagccctactcagcaatggcctcttcccaggtccgctacagcttcgcttccacacttgtcaccacagccacagtgtctctagctctgcctctccatatcatgtcactcagctcagtcatctttcccacctctccgtggcacatttaatcaccgaagtgacactgcagactgcagtgtgttacactattttttttcccacccaaacagctttgtatacaaatacttaactgcaacgagtcattggtctcgttcaaggtttcagtttctgaagcaccataaatactggactctagctgcgattcctctcagatatcctgccgttatctagagtcagcgtgacccttggaactggggcagagatgagagattccaggccaatgcacaacactctgctcttggtgctggctgctgcacaggctcacctatatggctgctggcagcgctgcctctcctccccacatcagggcaagcggcacagactgcagcagcacctgcagcttagccctactcagcgatgacgtgttctttgtctgtgatctcatgactgcccagatgccatacttcactagatggggctctgctctttaaaagcatcttcccatatgacttgcctttttcaaagttgttctggagatactgcaggatcttcactctccttctgccactgtgtctctcctcggagcttctatgagtctcaagctacaaggtccctcaggtgccagtggctgctgccaaactcagctcaatataaaacattaccaaaagtgtttttgctccgttaactttttgagcatcaatcttctttgaccgttacttagcaaagtaaaagttaagagctgacattttgatctttttgatggatacactaggcattatcctacccgttctccttaatctaaatcatatacttatttgcttcgtttagatcatatataccttacttgtatttagctccaactgcattttcactttctacggaacttaacagagatgtgccttgcaagagggttgaagaagaatatagctaatatgcacaggttcacatagtagcatagatcgtttgcaacttgatttccttccattcccttagattgtcctcaggacttgctcctcctcttcattctctcttgttgaaccttcttcctttctgaaaacaagcaagcaaatgaaagtaatcagaatcgagtgcagactgacactccctgtcactgcctgcaggcaggtccccatgccctactttttctcctactctgcagctggggaagaccagcttgtccactcctactggaggaaatagccacagaacattctgtctcctgaagctactttttccagttctcagtccttctcagcgtacaaatatgattattccatctttaaaaaacaaaatcatcctgccctgtagtaacacaaaagaagggtcgtaagtccagcctctaattagttctctcttaatgactcagtaccccacaagccaaacagctctcaccaaactcactttccagctctcattttagaagatttcctagcagttaacctgttttttgttccagatttttttttctagattttgttctagattttatttcattcccacaaacaccatcttcttagtcttctttacttagctttggggtctctatcttgtctccttcatctccaatgatgtcacactccagaactgactccctagactttttttctatcctgcacccacttcctggattatgtctcagtcatacgtcttcatctggcacctgtattcagacggtcctaaagtatatatgcattctctagaattcagccttacgtaactgccagtcttagcatctccacctgaatatattagaaacttcacagcacacttgttgaaagctaaacccttagtctttactgggaagtcccatctcagtgaatgacacctcctttcctgtccattttttcaggtcattaccccattacatacctatcattaaatcccaaaagtccagaatttgattgcttcacattcctgcagccgccattatggtttgagttcatcattatttggatttaaaatgacagctcttcactgacctgccatcatcctaatctattttcaacacagcaaccagaagaatataaaacacgaaccacactaattcacttctctactccctcatgtctctgatagcttcctgtctcccttagggtcagtgtggcctgcaagcccattacatgatctgtccccctgttatgttctttagtgtcattccactctcttggcttcaggtgtcttaccagcttttcttctttgacttattgtcttgccataaagtctatttcccctgcctaggatctttgtccctagacatggattttcttggatcatctccacactttattgggatctttatccaagagcttgattcagccgtcccagacagccccatttaaagtcaaaatccctgttttctatggaattaattttcccccttcaaaatgcgaatgtaatgatatttagaggtggagaccttatgatgtatcttagtgttctattgctgtgaaaagacaccgtgaccacagcaacccttctgagattgtttgtatatgctcagcccagggagtggcataattagaaggtgtggccctgttggagtaggtgtgttactatgggtgtgggctttaaggccctcatcctagcttcctggaagccagtcttccactagcagcctttagatgaagatgtagaattctcagcaacaaagtcttccatattcttagtaggatagcccattaagccccacttaaagtattccaatgctttccaaatcaaaagtccaaacaaaaacatggtcaggcctatcacagtgatacctcactcctggtaccaacttcttagttagggttttactgctgtgaacagacaccatgaccaaggcaagtcttataaaagacaacatttaattgggtctggcttatagtttcagaggtttagtccattgttatcacggtgggaagcacggtggcacatagggaggcacacatggtgctggagaaggaactgagttctacatcaagatctgcaggcagcagcaagaaagattggaatgggcccttgaaacatcaaagcccacccctagtgacacactaatcctttcaaagaataccactctctggtgaccaagctttcaaatatataagcctctggggccgttcttattcaaatcagcacttgaggtaattgggtttatgtaaggggatgagctcttagaatgagtgttctttataagtattctctccatatctctaccatgtgagttaaccaatgaggtatgcattcaaacctaattgctagttgtcgtcatgttagcatcctcatctcagatttcccaacctccagagtggtaagaaataaatgttgtttaggctacgcagttgacatcatgccacttattagcataacaaacattttactattttagttatatgtgattttattgtattcttccactagaaactaaaatccatgatatcatgggggtttgtttgaatcactgcagtatcaccaatcagtgcctggcatctggtaagtcattagcaagcacttattgattgtattcacatatgaggtgtgctatatcttagatttagcttgcatgtgacaccctctcccaaagattcatgtgctggagtttgatccttacagtgatgatgggacctttgagatatggggcccagtggcaagtggttagttaggtctttggtggtaccagttttggaaagggttaatgtaatattcttgggacccatgttggttctcttgaaattgagttatattggttactttgttcatcgctatgtccagacacctgacagacacaaggaaggaagggtttattttagttcatggttttaagttgtacagtccctcatggtaggggaggcataacaattcatggaggtgggaatatacagctagagttcctcatatctgggtagattatgaaacaagacctggacagaaagtggatccttgctatggtcctcaaagttttaatgttaccccaaacagtaccatcagctagggaccatgtattcaaacatgtatgtggggaacagttcactacattcaaattgtttataactcctggatctctttgtatttctctatgttgctgtgtgacctctccatcttgcacatgctagcaccatgatgccatcttccatgaacaccacctgttcttcaattttcaacctccaaagttgaaaagttgtgagctaaattaatctctctccctctccctctcttcccttctctttccaccctattttgacaacagaatatagatgaatacaatcattttcgcattaaaaatagcacatcattgcttcatacttcatcttgtcctctattatcaatgaattattgaaggttccttgtcacctctttgcaaaggatctatgagagacacagtgaaggacaaaggaaacattctcaccttgagtgtgatcaagaacaacctttgcctattggctctgagatgactttctagactataaaaacacagcaattgtatttctaggaagagaaacagatatacgacctattgagtctaatctgtcctccactaaataacttccaaaagataagaaaattggtgtttgcagactcacaggctggactttattcccagcatcaattgctaatctactgagtaaagcctggacacttaactactgtggaaactgaagttgtagtactttcagtcattaaaggagtatgaacctgtaacgtgttcaaagaagccaaagactcattagagagactttcttcataaactctgttacttggaaaggtctctctcaactcatcttcgtaaaaagaagcaagttgttccaggaatatggggtttgatttctttagtttcaactaattggcccaagaccctgaggtaagggaagaagtgagaccaagtgtggtaagggagtctggtggaaaaaaaggctcctggcagtatacatggctaaaggattaaaaacagccagaaaggaaaaggagaatcccaactggtatctacaagcaagcaatctagctctgtctgttgccttcagagcacagtggcctggagagtcaatgacattcactattcctcctccttacctctcatttgtcctgtcagtccactgactgtaagagcctctccaggaaccaccgtcttatgaagtccaatggtcattcacacagtgaccttgctcacttggcagttttcagacctaagtagcattctgtctcccaggagcacattctagtgtttgacacgtttgtgcctcttctccttcctactgcccattccctcccagtttcctttggtaacttctaaatctcaggctaaaacgttcattctcttcaggtaagtaagctcatccagtcccatgacttaaaaaatcaaaacaactgtgttggggtgtgtgtgtgtgtgtgtagtgtgtgtgtgttgtgctgttaacgtgaccatttttactttccatcattgcccctgagctctcgactgaataccaactgccacatgcttcaacataggcatctctgtctagttcacaaactagaagccattttttatttttcttttcctggacccctacctatggcctgtgagcaaatgctactggctctgaattagattctgactgacatccttcctccctgacctcttcactgtcccctcaccctcttctactgccctttcttcccatcaaagaccacattctctgaaacagggattagatcaggccacgcccaccatgctcgccatgcccgttactctgtggaaaacctccaggttcttcactatcctaacaatgaaagacaactcaacgaggcagcaagatcctgattccatcccccactccctgaccaagagagattggattcttcttccttggcagccaagcattttcccaattgtgttttttatactccatgtttaaggtgtgttctcgaagcccaccatccactgccgcccctgctcattttgttcagaactgagcttaagtgtctctcctcagacaggctgtttctgactcctccccactgttaactcatcacccacagtgttttctgttcttcaaagcttgtccactgtcatttgcccttcaccaatgcatcattaaagataaatttgatttcattcgatataacatcccctgaatcaggatggatggccggcattcaaagctcagtaaatatttgccaaattaatacataacaatgcttagtgcatttaccaaggacaagtttaactgacacctaacttcaaaggaagcaccatttgttgtttaattagctttgtatcttgaggcaaatttctctgaggtatcatttattcaacgtgtaaaatgtcttgactccccctgcatagggtaggttaccagtatctggcaagttgaaaatagttgctaattttctcccctgttttttgaaacttaatacatgctatagcactatccatatggcccagagtgggtttctaatctggagcgttagagagggctttaatcaatattttggtcaagatttgtgggtaacttgtattttcatctgggttaactaaccttttatgatactttttttttttactctcaattatgaattttcacaggcatggttgcattatttcattaaagtcttatagaactctagaagatacagttgtgtagcagataggcttctaggcctactcaaaagccaagaacctgcatacaaagttctgacctgtgccctggataaggaccacttactgcacattgtcccagccattctgaagcagtcactatagacccaggaccaactggggctttttgagttacaaggttcagtatgtatttttttctctgaggctgataagccatacacatcttcactgtctcaacagagccctgcttgtgtgtacactacttagcctagcactgaattctggaagcagagaaaggtggaaacgaaccccagtgcctcccccatcatatctttttcccaaatgtctactccttgggcctggtgaccattgccctcgcccccagcgatgcatatgatgctgtgtccttgtagctttggttgactaagcacccaaagttacctttctgtagcttccacaaagctagctctgtcctcattacggaagcctacttatactgcctcctcttcagcttagtgattagcaaccagtactccatctataaagcttctgacccctcatttatagtggctactcagtcactataaatgtcaaaggcatcagaaaggacacaagcttctttcattttgaagtagcaccccgagtccattcttcagaacatttgaactttccctgacacttgcaccagcgatgagagcagcttcctctctggccttataacacttaaacagcaggtggtgctacggatgcacaaaaggaactttgtgtagaccagcaggactgtcacagctttattttgtgactcataacatagaaacaagcttttaaaaaaacacgtcatataaagttattcacaatacaatttttttcagtttttttttcttttaatgaaaacgatttaacttagaaatctgctctgaaacttttgtctagttttgcaaatctcagatattccagtgcaaaaatagatccattacagacagcataaagtgcttggaatgagggccaatgataaagaaaaagcacaaaaccagcttcatcctagggcaggagggaaaagaacataccgaatccttatggaaatataaatgttctacaaaaagggatgcaacagttttgaatcagaacagtattactgtggcgttacactattaccagcaaatagtaatgaaagtacaaattagtaattcagtatcaaagtggttccccattacataacacatggctctttggaacaattttacctgatatatacaaccatgagaagacaacaaacaatccctttaagtcaatgcctactatacagagagcaaatgatgtatgtaacatttatagtcatgaggcatatgcttgcggtacagacaccaaaatacagtagtttgaggtttgtttgtttcataatgaattatgctaggtatatctagcgagaggactcactttcttttgtctttctcatattcacagttagtaagttttccactatttttttttaaagtaaaccagaagtgtttgcacttgagaatttctcaactcacaatgcacatctccatagggaatctaagaaattcttatttgaagataggattgatttttaactttctaaaataattacgtttaaacaggaaagttgaagattgctcttcagatagtgtaaaaggtaacataatagctacagattgtctctagcttcagaaaagattttaaatctacactcaattgattttgttttcaaaaatggtgccttacttttgttgttgttttgtggcctcaaaaatctgagtaattaaaacaaggatttttctaagggctgtacatggtgataatggactgagaaagccaacggaagtttgtttttgaaaaataaagacatgcttctttgatttcggtatctttgatatctaaaatgaatggtatgccaataactactggaaacacactttccttatcattttagaaacctatgttgacattagtatcaaacttgtcatttttcctttcaagcaatgaattacataacattatataaacataatttgaaatagatctgaaatcttattcttccaaatttttagaagaagttaaataaggatagcaaaagctcacttgaactttgcccaatacaggaacttactcatatttttgttttgtatgaagacggatgacattgagcactggtgaaataactatttttttccacgttgcttgcagatgaaaacaaattaagcttgggttagaaaagtctgaaaaaatatttcacgtggcagagtttgttgattgttttccatgactggttaatgacggaagagatgaaccattcgagatcgtcagaggtttaagtgggtgtctctcatcctgcaaagcccattgtttgcccatatggtgaggatcccaaaggtcagacgcatcgattgtatccgagagatttcaagctagctgctctccctgggaagagggggttacttagtggtccttcttggcttctgtattgatgctatcaagtaggcaagggtgtggccatattctttcagtggattttacaaaataaacctacatctgtacatcaatcagctgaataaatggcacaggaaatctgctagctccccctcactcctatccaagcatctacatagtaatgatgtttcaaaaatactccatctgcaacctgaaatgaatagtgctctacaggatcttaaaatatggcctgagatgttgactaccacattgttttctggtcactgcgctagtcagacattctatcttcaaatttaccaaggaaaataaaggcatgaggcagtccgggcacattcctctatgtgactgacatcacacgtgtacagttctaagcttccagaagcattgataaaacttaaaattccaaataatactaacaatgcaaacatttttgtcaaaatgaaatgccaccctttcattttctaggttaattcaaacagttagaaagaactagatttctgttaaataatgaaggatctcaaggtgtagtgtacccatcttgtgttaggagacagtcagcacaaaccaacccagacctgccacgtgtaaatgcactggatctttcatgccacaccctgaactgagccgcttgcagccccagcagtttggctgctaatctttgctgcttaggaggatctaatgtatttgaaaaagtctcagaaagatgctatggcaagccatgacaggggcatgggcaacactgaacaagagaaccaagtacctgggttagagagatgcacattttgtacaagacagccacaacagcagctcatcaaagagagaaggaaaatggggatttagtcacatgtggcaccgtttttgtcacctgatatttaatgatgtcaaccgacagtagggcggttttcacaaaagtgtttgtgacacactcagtgcttcagactttctgagcaacttggcactagtaactctggcacactcattgccagcaatggatgtgtcaccgggaaacctgttttgtggttcagcatggcttaatggcttaatggacgaggatgtgtgtgcctttgactttgattatcactggccatgactatttgatagactgttgttgcaatcctagtgagaatacacaggaacaaaaaaagtatgaatccaaacccagagtctgcttggttccacaccagagtttcacatctgtataaggtaatgaactaacttcaagtcattttcactagagagccatacaagacataggctacaaaggcactgcccctgtaatggaattgtgttctcgttgcattgaagtgcattgcattgaatagtgtcagtacagtatccagtttgttcttctccacagaaacgcaggacgctttcttctagaacacttgacacagtgcaaaggaagacctcgctcttccttcctttcattcaccctgtgtgaacgggattcttcatacataactttctttcactttctcatcctgcaaaaaggatgtgagaacggccacatccacaactgtctggtttttgtgcagtgacaggtcctttaagtggtcatcatcactttggtccttggcaaagttcacaaatacctggcaaaaggaagacagacggtcatgaaggcctctgcactgaatcttttgttgttgtagctgcattttatttatggtggcatttttccttgtgttgagattaggagaacacagaattgagtaagtacttgaaggagaaatcccccatgaaagggagagctctcgagaagcacagaatgcattgaaatccttttctacatcacccacatcactaactatttaaaccacccatttatcaatcatccactttagcatatctaggattaattaagaggaaatgaaaaaatacttgctggatacctactaactgccaagctctgtctggtatattgctggggattggttctcatgcattgtcttaatttggctcccacaatcacacaggaatatacacgtccaattgctgaaggtccctgtccccagttagtttttaattggccaataaagttactaacagccaatggctgggcagggagatggaggtgggaattttagatttcctggacaaaggactaagggaaggaggagggtcagaatcaccatgaccgtgatggggaagcagagaggtcagatctaagagctgcaggacagaaattatccagccatggggcagtcaggaaagcatccccaggccaatcccccaggtgtgtctggggcagtagagataaaatatagattttaaaaggtgataactctggaatatcagaggggagagtgggttagccacatgaagtcagggagaagcccagccttgtgcagtgagggcatattaaaattaactcgggtgtttgtgtcttttatttcgaggatccagagaactctcgtgggtggcgagaaatgtgatcatcagctaggacctcagagcagtttcacagattactgctacaggatatcttgttatgtagaagagataaagtctttcgggatagcatttgaaatgtaaatgaagaaaatatctaataaaaaatgataagaaaaaaggaaaaaaagaagagagaatgcttctggcaaaatgcctgactcatgacaggtaatcaatggtagttattgtgactactgttactacagtcacaatttatatatagtagaaagcatcaacgttttgcatgtgcccacagaaatctgtataatataggcagtaatagcaggaatggaatcaaagcacaggctgaagttctctcaagctgatggtggggagaaaggagcaggcatcccaagcctgtagctaaatgtacttttcactgaaagcttacttggtcaagtgttgtctgagagacagagtagtcttctatgtggagtcgctttttgctctgggagaggatgctgaatatcctggctagagatgacaaggaggatggaagctggtactgaagcatgtttcgatgtttctcttttaggacacttcccggaaacgcaagtccaaagaactcctggacaggcttcaggtcagggttggagcctgctattcgtacaactattgtataaccatctccaaacctgaaagcaaaaacccaaacacacacacaaatggggcattcgtagcaaactactcaagaggatactcaattctgaaaaccccaacttgtaccaagaaaaacatcagacccacggagcagtttctgagaaagaaccagttttatctaccgaatacctagctgtgtatggtacctagctcacagccttgaatacgagattccattaaaacctcaatgtggacctaggaagtctgacatagagacaaacagaagcccaaggaatttagtcacctgtccatgtccttgagttaacgcccagttacggcagggtaaggatataaacctctttgtgttacctccacagtgtgtccttgttatcataacatcacaagtgaattattaagtttcacttatataactaaattcggaatagtctcagaaactgactcccagagatgctgagtaacctgcctacaaatcgcacagccagccagtacagggcaaaggcaaatggaatactgcccatttaggctttagagcctgtgttctttttcctatactcttctgtttttattttaagctatcatgcaaacacacatcaaataaataaataaatacatacataaatacataaaaacacaaaacaaaacaaaaaccccaatgacttcagtatgtgctatcccaaagaaatggtccccgttacctgtttttcagatgttggacactgccaaggcacctgaaccttccattgaccattatggccatccttgtacaaagagcttcacattcttccatactgtggggaaacagaatgaggttttcctttcaaacagatgctcctataagcatcagagtatcactatgaaacctggcctttcaatgaaacagacccccattatcctaggaccttgccatgaaacagaaataatagatcttttctgtcatgtgccatacagttgtaaaaagggaaaaataattcaaatgtttacaggaagaacagttgcataaattagggtagatctttacaaatgacaatgcagctgcgagacatgatggcacacctcaattatatgacttgaaattttgttttcagtacctatgttataattaaatttttgtttgtaaaatacttaagtgcttatatctttgcataagaaaaaccctggagtagatacagacaaatggtaatagttatctctagatggaataattccaggtgatagctgtttcagtctttgtctttgtttttttcatttttataaaatgaccagatataatagcaccctacagaagccaagattgtacagtacagacctatgagatgtaaggactacagatctcccctccttgacaatgcttagggcacaattccacaagaatctccgggctttagggtccatgcctgtggttggttcatcctataattagaataaaacaagtttatttgctggaaaaaaaatgtcaaggacaattttttaaaaggatttatttatctattttatatatgtgagtacactgtagaagagggcatcagaccccattacagaatacagaaggttgtgagccaccatgtgatttctgggaattgaactcagggtctccagaagagcagtcagtgctcttaaccactgagccatctctccagcccaagacaattttttttcaatgctaatgatcatgccgggtttcccagagtgggggtggggtgagacatgtggatttctatgagctcaaagtcagcctagtccacataggaagttttaggccacccagggctacatagtgaaaccttatagcaaaacaacaacaacagcaaaacaaaaaccccaaaactttttgtccaaaattatttttgaagtcagagcagtgaaacttacatcatatttttctccttgttctattacatttgctaatcatagagaaatttcatatccacatggtcaataaaaattaaagcttcaacccaaggcttcttcccatactcccagtgttctctacaaaatgaggatcaaggaccactgcccagtctggtctggtttttattcatctgtatgggagcaactatgatgcagtggctactatggtcatctgtggctactatgtccatctagaagccatgtcctcacttctacctttggaggatgaacaacatagagtcatgaagaatattcctgagactattcaaatagcaccttcaccttcagccatgtttgtagggattatctaaggcaaggaaacaagatgagtggagcttgtctactcaggagcctgtaaaggtacagccgagccacccagcgtgctgtgagggagaagcctgtgagggagaagctgtgagggagaagctgtgagggagaagctgtgagggagaagctgtgagggagaagctgtgagggagaagctgtgagggagaagctgtgagggagaagctgtgagggagaaactgtgagggagaagcctgctctggaccagcagatggacttgctatcaccatgccaagtacgcaaaggcctacatgtgacttcagataagccatgatgtctattcaagacagaagaacaatttccaccctccactcactcacacccctctcacactcaccagaaacaccacaggaggtccgccaatcaaagccatggctgtggagagctttcgtttgttgccgccactgtagttactggcatatttttctccatactttaccaggcccagtttgcgaattgcccattcaccaacctagagagattaaaaagcgttttgatttttgtctggctgagtattgtcaccatgctttcttacacacaatgtaggaaagttctttcattgaatcggactcaagtctcagctacctctgaggactcacaggagggagaggggacttatgtagtgggacctgcactccctgcccccgccctctagcctgtgcatgcctcccttcccctgaagtcagtgcagagactgcagtgtgagtaaagagacagtctcaggttgatgtcatgtatgaagaaggtattcaatatataggtgtcaaaagacagtctgctttcctggttcctacaataccttgccaacttccttttctgggactcccctcaggagggcaaagaactccacatgctctcttcccgtcagcagctctgtgatggcgtcaaactgagggcagtagcccatgttctggtgtacttcatggatatttgataagatgctgtaaggaagacaggaccagtcaggttttaagtgtttagagatattctgaggagacaatctggcttgacagttcttaaaaatatatgcttgtatagaacaaatatacaccggcttctattcagaggaccaacctttctgtccctaggatgtcaactctttctatcagtagggtcctgtctcagccctgcatgcttggtccagcatcaaaatgagtctatacaactgcaatatgggctttgccaacagactcagtcacaccaatctggaacttcaacattaagtttccactgcaaatctgactctgtgagctggtcatatgtaacaagtgtctctatactctagtcttccttaagaccatgcagtaccacgtaagtcccagaaatgctgggcctgggttcttgctgccttctgctccccatttactgatttggaacattcatgttccaaacgttcttattccaccaaatatacaatgcagactgccacttattcctctatttaattaattatagatcttctaatatgttaacaggaaaaaatacacatataaataattttacttaaatccgtaggggcaacctctaggttctaaaaagcctgtcaaactaatagttgctattatctaaaaattgtgacattcatattccagtctgatggatgcctttcagtcacctccagatagccatgaacttgacatataggtacagtcctttctgcttatttagtattcttgggttagccttctcaagacttaaaactaaggtacccatggacattgtgcctggctctctctcacagctacattatccaagtcagttatgtaatcagtagctgagataaaccttaggatggacggttattgtctctctacatgttccaggagcttggtactagacagactagggagtcatcactattcccagaatttctattcttttaaggctcctgtagattgctactgaaaaataagtcagtaagagacaggagaagatggatgagttcattatgcctctgactctacaataatattgactatctctagtcaatgtttctgaactgtgagcaatctcccattactaggttgtgaaataaatttagtaggtcacagccagcaatttttaaatggcatgatgcacactagtgtatgaactattagggtaaactacaagtagtaacagtaggtgggtgccattttaattcattaggtgtatgtgtacctctgtgtctgtatatatgtactacattgaaaataccacctaacaggtctctgatacatagctttatccacaaagattagtaaatggcttaatggtgtctttatcaattgttacacactttacagagggcactttaacaggtatatgcccttttaccatgtagggaattttctgaggaaataacagaaattatctacaaggacatatttaaacagcgaatagagaaactaattagtgcccaacatttataatgaattgatcaaataaacatatttacttggtagagtttctagattttagaatatgtaacccattgtaaaatcttcattataaaactatttataatatagactcaaagtctatatagagctgtgctctgttatggcacatatagatgcataacagatcggagccaagggatagctctagaacttggctgtgatcatgtaattcaatgaattgactaaaaatcacagatctattctctcagatcaaggaaattatatatatatgtatgtaaattatggataaataagagggaaactgaaagaaaatgtaaaaatcaggcttatttccaggtagtgaacttggacatgattttaagaggttttgaactcaagaaacttcaatgcttttacaagctatagtaataagatagtcagaaaataactgtacatttatttcttaaggctggagaaagaaaacctcggcagcaaatacaggctgcttctttgcccacctgtttttgttaaggaacgcatcccctctggtcacaggggtgtctccagtcagcatcttgaaagttgttgacttcccagctccgttaactcccaggagtccaaagcactgaaaagcgagactaggtgagcggcaggaacaaactcccaaatcttagtctgaatggcctagcgaaccagccccctgggcctgggtgtgcttcaccatggagcccagagcttcactcttaagtaccaatgagttccatattcagatatcatgagagcatgtatgcctgcctctctctctctctctgtgtgtgtgtgtgtgtgtgtgtgtgtgtgtgtgtgtatgacagagaggagatggggaaggagagaaggagagaggagagagtttatgtatgagccatgttgtttgtgggtcttttttataaagactgaatcatcaagttgagaccaaggtctatctataaagagcaataaaaaagccaaatggtcaaaatgcatacctaccatccaccctaagaacataaaagaagtccaaaaaatacgtgaaaggagaaaatctacattttaccctacttgaaattcatccctgaatggatcccccaaggcgtaatctagatgtgaatgttttctgacactgcctgagagcgtccaaacctgttctgttctgacacaagaggttctcattctctccacgactgatcgcttctcacagacacaaaaacagaagccttgaaaagccattttccatagttacaggacactgttgtttggtttggtagctagggtcggaattaatagagacaaaacacaacaggagcgcagtgcatttacctctccgggagggatgccgatgcagatcctgtcgactgcaggcttccgcttcctcctatagatctgcaaccaaggaaacacagagatcatgcaccttggaggctctgggctctcccagccaactgtggaggaaggggctctgaaagccacactccccacagaacagaactcatcggatggctgcaccacacacagatgtgccaagaacctttctctgtctccgcaatgagtagcctttccctgaccctgaaactttttattcctgagtcttttttccttaaaagacagtgatatattttaaaattaaattatgtaggttggaatctataataaaatgtttcaatcaccataaactaaaatgtgagggtcgtggtattcagaaagggtcgaagcagattgtctctctgagcaacggaggtagagaggatctttgagccatgaaaatcaaaatcaactatttgttctctgcactttgtctcgacatacaatgttagagtgttttaatcactaacacgaatgcaagtatgttcaataaataaatctgaagagtgggaactgcattacagaagtattcccagtaggattttgttttttaattaagaagtctccgtggtgtagtttaagtaaaactgacaaagctttgtgtagaggcacatttggggaagcaccgggttttgttttgttgtcatgaatgaagcaattcagcagaaagctagtgaggagataaaatgcagaaaacagaagagaagctgtggggtccacagtcgctgcccaccttggtcagttccttgatctctaggatgtcattctgtccgccaccgtccagaatcctctgtctctcccgcctcacatcctcatcctcgtcattcaaaggaggaagcttcgcctttacaggtcttgggagaaagagtgtttaagaaaagtcaatcttttcagctcttttccaagggaaaattcaagcttctaaagcactttatcaaggccccgcgccatcacttcgtgggtggacagagcatgctcacggctgggaaaatccctttaactgggcgagttcagcccacccaggactcgtgagtcctctctgcacccatcacgtccctggaacagttctcagataaagctcacctgggcctgatgaaaaatctgtactggatcagaacagtaatgaggaagaacaccaccccttccacggccatggcaaaaaggttccgtcctaccaagtcccaagagagcggagagacgaagcggttctcccctgtgagacacaatgcagacataatctggtcagaggggcgggcatcagaaatcatggccctacttcctgtttctgagatgagattctgtgcgtgactttgttgtttgtatgctttttcatttaaattagttaatattatgctaaaccttaaaggctagcttaacgtaaaatttcgtttttttttttcacacttgaaatattaaaggacttccttcatattaaaaaaaaggaaggatgggaggaagagagggagggagggagggagggaggggaaggaaagtgaggaaaggaagaaaggatttcctcatttggggggtcagtttcacacaatttttctagaaacatgactcatgacaagaagaaaaaggagtaacataggtgtctactttgagatttcatttggaaaactataatacaacctggtatcaggtcagaatttcggagtcaattagcttttagatctgtaagttcattaggattgataagatttcctttttaatgagacatgcccccacccaaacccaaacaattcaagtttgggttgaccaataatcctggataatttggggggggggtcagaaagtatgggtattagaaaatgcattcaaaagatgtctatttctacagtatctaatgtaacctagtgacttaagttagatggttttaggataatatcccttaattcttcatgtctcctctgtatcactaaactgaaaatgttcctcttctatgtttgttaagtagcattaattaactcaattaatcagcaaatgaataatagtcacataatggacagagatattttaaccattataaaagtagaaaaaaagattcaataaattatctctttagagaaggcataaaacacaatatatgagcacacctgcaggcccaggttttcttagtagaatcaaagggtatctctctctctctctctctctctctctctctctctctctctctctctctctctctttaatctccagcctcacctacttgccaaagctgtggcttgatttttccagtgatttgacaagctcaccagtagtgagcttaggaatttatctcaaacaaatgctaggattttcttgtttacaacccccccccccacacccgccatttatctcagtgctatcagaggcacgaatacacacctatatggtgggactcatgacagacagagcagctgtgttggcattggcccatgacagttgggaggacagatggcctgcacccagtcccccttctaaagcagcaatcagagtgccgatgcctacaaaactgtcacaccgccatcgaagcttcccactgccttactcaccaaacctctccagggcatcggccatggcctggttcttcaccatgtcgatgagccctcgccccaggcaaaaatgtgggaagataagaaacacagacttcaggatgtcattgatgtcattgagcttctgcagatgagaaggagagggagggagagggagagacacacatcacttacagtctacattacaattctatcaaagtctaaaatatggacttgaagcaaagcatctgacgtcctggacctgtggatgcagataccagtgaacagcggcgggattttcctcaggaactctgcagcgatagtgtttgaaagcaaacaaacctctaagcctggtaacttttaaccagacacaaatccacaatgaaacattggcttagcatttttaaagcaactcactcctatctaggtgaacatccgagtttcagcatgctgttggaatttcaaagccatcttctcaattacatcagaatgtattatgaccccataagacaaggtttgttaaatatcaagcccctggagctagagatatgactcagtggttagagaggaccagggtttggtccccagcatctacaggatggctcacaggtggctataactctagctccaggggatccaacgccttcgtgtgggccctgtgtgcactacaggcacatggagtacatataatatgtgcaggcaaggcaccaatgcacatataataaaaatagaaaagatccagcaaagttgttacttgctggttgtgctgagccagagcctggaggatgcttacactgcactgaaggaagaactgagggctctgatggtccagagaaaagaaagcttatatcttactgggcagatgaggaaagcttcatattagacttaaatcttaaagggtatggagacactctcaggtcccatgacaaatgaagggcatttcaagacagacctacaggagtatagtggtttaagggaaaactcagctgaaattttaaagcattgggaggggatacagtaatatatagccaacaaggcactatgtgctgagcaagggccacagagagtcttgtttatgagatttgaaactgggagaattcagatgaatcatatataaaccgcaacacaaatggatgggtccaagagaggtatgagaaactgcagagatgtcaccaagtaaacagagatggcaagaggaccaataggttctagtgggaaagacaatgtgtctagtgttggtacctataaatgacttaaatggagtcatccaataggctgtgagaactggagaacagagatccaagagacaatcaaagcatggatctgagagataaaaatgaaaacctgcaatgatggtaaaggcctgaagatgaacggcatcgcccagaaatgctgcctaaataggaaagcaagccagaagagaatgaacacagtcttttccaaagcaacactgaaggagaaagaagtatgaaaaaataaaggaaccagaaagacttgaccagagaaatacaaggcacagcaggacagagagagagttatatgtatggacacagcttgcaaaagcagagaggtcagtggtgtggatgttacaggcaagtggagtaaggttggagacaactgccactctcttgaacccagagtgccagccaatgggacatgctctgcccaatgggacacttacattgtttgtaaacagctccagtacgaaagtggccacactgccattgatgccgatgaagaggttcacactggtgagaaccacataggcggtgctggggatcttgaacacaaaggatgctggatacatgagaggagtgatcgaccacctggtgagacacaaacgtaagcatccactggcgccttctgccctccctctagcaccgggtaccatatgccttgtcccctggggggagagctccactcagagttgccttacccatacagcaagagcagaagggctagaacgggcaggttggtagaggacacataggacttctgctggaagcagatgaagatgataatgaccagtgtagcagggaccacataattgcactaaaagagaaaataaaagttggcccctaagtcagatatacaacaaaccccaagtcttcaccaccatcccacaagaaaggacagatacagatgttggagaataactttgaattaatgaagccacataaactattaatcaaaattccggacaatacagtttgacaagcattttacccttggctgattttataaactgcatgccctttctgtctttcccagagctcagccaaggtgtcacgctcagtaaacttactgaaggatggattctcaggcagagtcatttcaatttcacaggaggcaaatgagtttccattattctacccagagatgattgcgtctgtttcatcattaatgctatattatggtctgcccgcattcaatcccacatgtaatctacttgtgagataagcactcataacatgaatgtcaaaattgtttcatcacaccgggaataattttacagtctgtcctgacagtgcttcaagcattaaaatgaagaaataaagacttgacccagggacaattatgaaaattcatagctggcagagaggtggaggggggcagcacatgcatggaatggaggtgatagtggattggcagactgtaaaagaattgtagcttcagaaggtctcagtcccaccctgcttaatgtgtttatcaacgactccaatagccacatgcttgcagcagactgcaggctcttaggcagggagggtcagaagttcacagagtccaagtgatgtccctgaggtcaaggactcactcttccatctctgaatgacctctgcctagcacagcaagacaccatcaaacacgcagtaagcactcagcggattttaaatgaatggattgctacgtcaagataaaagaaagcaaagaaatgctgacaagatccagttttaatagcagtttaaaaaaaatgattaggttcaaacaagttgattctgcgcattagcacagaatgaacaagaccctgattaacagttcacaggaaataggtttcagtttcattaccaagtagaaataaggcagggcaactttagataaagattagctttttctagactcggaaccattcagaccacagcctgaactcagagttaattcagggctttgcttttggaaaggaatattgatagatggagtggtcagatcaggagactggcaggtcttagagcttgtcttgattagcatatgcaatttcattatctccgtcatcatcacgcatctctgtacagtgtcttagagaacccgggtgctctcagataccatctcgtcttcgagagaagtttctttactgagagttgcctttaaacgtctgggggaaacgtttattgggcaaagagttagatctgctctgaattaatgacggccataagggcgtatagttgccaataattggaccttcatggttctatgaagtcgttcatattgatccaaacgaaaacaatgcagtatagttgatacaaaacagataaacgacaatgggcagacaagatgctggagttttcagtggcaaatggcttccttagtaaggcaaaaacaaaacaaaacaaaacaaaacaaaacaaaacaaaaaacccagaacaacaacaaataaacaaacaaacaaaaaaaacaccctgactctaagttaaaacacatcagataagttagaagttctggcttgggtttttatgaagtctaattgtagtctaatttttaaagggaattctggctagatttatgtcaacttgacacaagctagagtaatctgagaggagggaactaaattgagaaaatgcagccataagttctggctgtatagaattttcttaattagtgactgataggagagggcccagcccaagtctggtggcaccaaccataggttagtggtcttgggctctataagaaagaaggctgagcaagccatggtgctggtccgacatgggccttgatgggaacacgtgctcctgggacagggtcagtggaccggatcccacccagctagcttatcctttgtgcttaacaaaggtaggcaaatctctgaatccaatgttaaaaggacatgtgggttgctgtctcctaagaatcaaagggctgggtcactgattcctaggataatcaaaagggaacgtggagcaaatgactggattgatatataaaataaaagactgggcttatgatctgcaagcgatgcattgtccagagaactttttagaatagtaagaaaggactgtctcagcagagaatagcaagaaacagctgtctagagagtgtgtgtgttgtctgaagatcgatctccagagaaagcagatcagagagaaagaatgcagaacagagagaaagcagcttggaaagctgtctctagcagagcttggagtcctttgttttcaccactcccagacactccttcctcagaacccctctccaagccaaggctggtccttggtaccactaggagcaagccagtgagcagcatgcctccatggcctctgcagtagctccctgttcaggttccagccctgcttgacttcctatcccgattgcctttgatagtgaactgtggtctagagagtaaggtaatcgttggtaataattgtagtcacggtggtcagatggtcccatggtgtgcaattacattttaaggctaacattatgtttggtgtcctggggccatccagcgggctctcctttttcctattttacactggtttacactaagtgggatacttcccggggttagtggcaggctgtttttccttagccccatgccttcacagtccccattgagattcacacagagatagaaggtcctgtgtcctcaccatatcccagacaaaattggacagccagtagatgacaggcttcacgccgctgatgaactgaagatgcttggctttgctcacacgctcctggatcaggaacacaacaaagctggcagggacaaaggacatcgcaaagatgacacagatagacacgaggacgtcgacagaggtggtcatcctagaagggaagagacagtaaagatcagaggaacctttgatgcagctggggacatggtatataattagctagacataaggacaaccaaggcacagctggaacaaaaccccagtcgccaaacattttatctcaggggtccatctaattattttcaagtaacgttaaaacaacaacaactcaaacctaaaactgatttggaaaatattaaaatgggtctactcccataatgaaactacagaacaaagtataggtgtggcctaatagcggtcatttgtctccagtttctgatcttagagtagtgagttgtaaactcccatatacaaagaaggtgtggcttggaaactatttcaaacaagaaagaaatctaatctggaagttagtcatacaagttaatcatatgactatactataagtaagtggaaagcaacaggatacatatatcaggctaagacataaaaaaattacacatacacacacatattacatatcagtctaacaccatctaatatgtacaaaaagcccattatacaacgtcttgtaaagatcctgatgatcaacattaatattctacagtagtttatagtaaagtgccattccccacatatccaagaggggatctaatatactgattattaactctgtgctgggtgctggctgacgaaatgtatacaaattacctcatctaatattacatacctataaagcttagacaccaaagttaaatccagattcttttattccaagactttaaaatttgcagacatgtacaggagtatacacatgcatgtgtgtgtgtgtgccacacatgcatacacatgtttcaagaaagaaactattaaatgcatgtttcactgaatttaaaaacctcattttcaagcaaatgaagtagtaattactcttggatttcactaacaattttaattccctacatgtgagtttatcaatgtgatgattttcacatatctggtcttccttcttcaagtcaagaaagattgccagtcagtgcataaaccaatcattttctgcccagagtctggatcaactcaggctcatacaacataattattactagctgttacaaccagctttgcggtcttttcccctggtgctcggtcaccctaaggtcttcacgcccatccctttagacacacttacagagccacctctgagagctgctgtttagtgaggttcaaggggtggttgaaagcagtgattccatactggctcgggttctctcccttctgcaggttggcccggagaatggcattgttgatgacattcaggaacgaactgatagcatgccagcccttgttattgaaccacacctgaagtaaaacagaccaaactcaaggtaatactgccaaactgttcttcaagaagtaagcgtatatgcacaaaacgtgcatggaaacttcagaaacttagtgacacaccaaacaaaagcattatagattcaggatccaccaaccactggccgagggactaggtgaagacctttacacttttaactagttacccacatcgagtgagaggcagccatggttgccgccttcctgctgcacaggaaacggatacttaaacaggtcaggtagcttaaggcaaagaccacagcagtttacaagttacgtctggtggcaaaacacattctcttagtcactaactatgctgaatcatgtcactggtaagactaacagtttgcccttttctaccacgaatgtccctagttacttgcccgtaagatttcaaggaacacgggattattgtttagcaagaagctggcagaacacaggcaggggtgtaccttgacattgtttttcgtatccagccctgccatgaaccttcccaggctgctgaggaagcgatctgcggagctgtcctgtaaacaacagaatcctgcctcaggtgtctgttcacacacacaaggggtgacagcaagcaatgagacagccctgtatcaaccaagacaacttcctcttcagtcactgaaattaaatctaaagccaatgcatatgtagttcctgagcaccaagtcactagaatccaccgtactaatgttgccatgaagtcacaagtcatgggaaaaaatcgcgctctctctctctctctctcacaaacgcgcacacacacacacacacacacacacacacacataacctaaatcacacacacaaatacataaatacacaaataatcccaagaatttggagctagagatggattagaggtgaagaggacagtctgctcttccagaaaaccaaggttcgattcccagcgcccacatgggggctcacaagcatctgtaactctagtctcaagggagcaaatatacgcttctggcctctgtgggtaccagaccacacacgtagtataaaaacatgcacgcaggctagccacctatactcataagtgaaagtaaattaaatttccaagattcttcagagtctcttggcatcatcccaagaactaaaacccataggtcatgcagatgcatcctacggcttaagcgccctaggcccatgactactgtgcaaaaccccagagtccacatcacctgaccatttcaacttgggcaacctgagatagggagaaataaatatggccttagctgctcttaaagcccagccaaccaacatggaaagtgaatgaactcatttttcccatttcctgtctagccaatggctgttttaggaaactgtttgaaattcaatttattttgcccactagctaacttagcagcttggcttttgtaagagcttttaatctctgagttcatttttgacttacactttcagaaacgtatgttcgtgtgtgtgtgtgtgtgtgtgtgtgtgtgtgtgtgtgtgtgtgttgggtatgagtagtctggtttatctgaactgctttgtatacaaacctgttcagactagtatcactacacctgtgtgccagcaattccagacccacttttctttttttttttttttttttttcatttttaccatgactttattttattttttttttccattttttattaggtatttagctcatttacatttccaatgctataccaaaagtcccccttacccacccacccccactcccctacccacccactccccccctttggccctggcgttcccctgtaccggggcacacaaagtctgcgtgtccaatgggcctctctttccagtgatggccgactaggccatcttttgatacatatgcagctagagtcaagagctcaggggtactggttagttcataatgttgttccacctatagggttgaagatccctttagctccttgggtactttctctagctcctccattgggagccctgtgatccatccattagctgactgtgagcatccacttctgtgtttgctaggccccggcatagtctcacaagagacagctacatctgggtcctttcgataaaatcttgctagtatatgcaatggtgtcagcgtttggatgctgattatggggtggatccctggatatggcagtctctacatggtccatcctttcatctcagctccaaactttgtttctgtaactccttccatgggtgttttgttcccacttctaaggaggggcatagtgtccacacttcagtcttcatttttcttgagtttcatgtgtttaggaaattgtatcttatatcgtgggtatcctaggttttgggctagtatccacttatcagtgagtacatattgtgtgagttcctttgtgattgtgttacctcactcaggatgatgctctccaggtccatccatttggctaggaatttcataaattcattctttttaatagctgagtagtactccattgtgtagatgtaccacattttctgtatccattcctctgttgaggggcatctgggttctttccagtttctggctattataaataaggctgctatgaacatagtggagcatgtgtccttcttaccagttggggcttcttctggatatatgcccaggagaggtattgctggatcctccggtagtactatgtccaattttctgaggaaccgccagactgatttccagagtggttgtacaagcctgcaatcccaccaacaatggaggagtgttcctctttctccacatcctcgccagcatctgctgtcacctgaatttttgatcttagccattctcactggtgtgaggtggaatctcagggttgttttgatttgcatttccctgatgattaaggatgttgaacattttttcaggtgcttctctgccattcggtattcctcaggtgagaattctttgttcagttctgagccccattttttaagggggttatttgattttctgaggtccaccttcttgagttctttatatatgttggatattagtcccctatctgatttaggataggtaaagatcctttcccagtctgttggtggtctttttgtcttatagacagtgtcttttgccttgcagaaactttggagtttcattaggtcccatttgtcaattctcgatcttacagcacaagccattgctgttctgttcaggaatttttcccctgtgcccatatcttcaaggcttttccccactttctcctctataagtttcagtgtctctggttttatgtgaagttccttgatccacttagatttgaccttagtacaaggagataagtatggatcgattcgcattcttctacatgataacaaccagttgtgccagcaccaattgttgaaaatgctgtctttcttccactggatggttttggctcccttgtcgaagatcaagtgaccataggtgtgtgggttcatttctgggtcttcaattctattccattggtccacttgtctgtctctataccagtaccatgcagtttttatcacaattgctctgtagtaaagctttaggtcaggcatggtgattccaccagaggttcttttatccttgagaagagtttttgctatcctcggttttttgttattccagatgaatttgcaaattgctccttctaattcgttgaagaattgagttggaattttaatggggattgcattgaatctgtagattgcttttggcaagatagccatttttacaatgttggtcctgccaatccatgagcatgggagatctttccatcttctgagatcttctttaatttctttcttcagggacttgaagtttttatcatacagatctttcacttccttcgttagagtcacgccgagatattttatattatttgtggctattgagaagggtgttgtttccctaatttctttctcagcctgtttattctttgtgtagagaaaggccattgacttgtttgagttaattttatatccagctacttcaccgaagctgtttatcaggtttaggagttctctgttggaatttttagggtcacttatatatactatcatatcatctgcaaaaagtgatattttgacttcctcttttccaatttgtatccccttgatctccttttgttgtcgaattgctctggctaatacttcaagtactatgttgaaaaggtagggagaaagtgggcagccttgtctagtccctgattttagtgggattgcttccagcttctctccatttactttgatgttggctactggtttgctgtagattgcttttatcatgtttaggtattggccttgaattcctgatctttccagaacttttatcatgaatgggtgttggatcttgtcaaatgctttttctgcatctaacgagatgatcatgtggtttttgtctttgagtttgtttatataatggattacattgatggattttcgtatattaaaccatccctgcatccctggaataaaacctacttggtcaggatggatgattgctttaatgtgttcttggattcggttagcgagaattttattaaggatttttgcatcgatgttcataagagaaattggtctgaagttctctatctttgttggatctttctgtggtttaggtatcagagtaatagtggcttcataaaatgagttgggtagaataccttctacttctatcttgtgaaaaagtttgtgcagaactggagttagatcttctttgaaggtctgatagaactctgcactaaacccgtctggtcctgggctttttttggctgggagactattaataactgcttctatttctttaggggatatgggactgtttagaaggtcaacttgatcctgattcaactttggtacctggtatctgtccagaaatttgtccatttcgtccaggttttccagttttgttgagtatagccttttgtagaaggatctgatggtgttttggatttcttcaggatctgttgttatgtctcccttttcatttctgattttgttaattaggattttgtccctgtgccctttagtgagtctagctaagggtttatctatcttgttgattttctcaaagaaccaactcctcgtttggttaattctttgaatagttcttcttgtttccacttggttgatttcacccctgagtttgattatttcctgccgtctactcctcttgggtgaatttgcttcctttttttctagagcttttagatgtgttgtcaagctgctagtatgtgctctctcccgttttttcttgaaggcactcatagctatgagtttccctcttagaaatgctttcattgtgtcccaaaggtttgggtacgttgtggcttcattttcattaaactctaaaaagtctttaatttctttctttattccttccttgaccaaggtatcattgagaagagtgttgttcagtttccatgtgaatgttggctttctgttatttattttgttattgaagatcagccttagtgcatggtgatctgataggatacatgggacaatttcaatatttttgaatctgttgaggcctgatttgtgacctattatgtggtcaattttggagaaggtaccatgaggtgctgagaagaaggtatatccttttgttttagggtaaaatgttctgtagatatctgtcagatccatttgtttcatcacttctgttagtttcagtgtgtccctgtttagtttctgtttccatgatctgtccattggtgaaagtggtgtgttgaagtctcccactattattgtgtgaggcgcaatgtgtgctttgagctttactaaagtttctttagtgaatgtggctgctcttgtatttggagcatagatattcagaattgagagttcctcttggaggattttacctttgatgagaatgaagtgtccctccttgtcttttttgatgactttgggttggaagtcaatcttatcagatattaggatggctactcctgcttgtttcttcataccatttgcttggaaaattgttttccagcctttcattctgaggtagtgtctatctttttctctgagatgagtttcctgtaagcagcaaaatgttgggtcttgtttgtgtagccagtttgttagtctatgtctttttattggcgagttgagaccattgatgttaagagatattaaggaaaagtaattgttgcttcctgttattttagttgttaaaggtggcattctgttcttgtggctgtcttcttttaggtttgttgagggattaccttcttgttttttctagggcgttgttcccgttcttgtattggtttttttctgttattatcctttgaagggctggattcgtggagagataatgcgtgaatttggttttgtcgtggaatactttggtttctccctctatgataattgagagtttggctgggtatagtagcctgggctgcagtttgtgttctcttagtgtctgtataacatctgtccaggctcttctggctttcatagtctctggtgaaaaatctggtgtaattctgataggcttgcctttatatgttacttgacctttttcccttactgcttttagtattctatctttatttagtgcatttgatgttctgattattatgtgtcgggaggaatttcttttctggtccagtctatttggagttctgtaggcttcttgtatgttcatatgcatctcattctttagatttgggaagttttcttcaataattttgttgaagatgtttgctggacctttgagttgaaaatcttcattctcatccactcctattatccgtacgtttggtcttcttattgtgtcctggatttcctggatattttgagttaggatctttttgcattttccattttctttgattgttgtgccgatgttctctatggaatcttctgcacctgagattctctcttccatctcttgtattctgttgctgatgctcaaatctatggttccagatttctttcctagggtttctatctctagtgttgcctcgctttgagttttctttattgtgtctacttccctttttaggtccagtatggttttgttcatttccatcacctgtttgtatgttttttcctctttttctgtaaggacttctacctgtttgattgtgttttcctgtttttctttaaggacttgtaactctttagcagtgttctcctgtatttctttaagtgatttattaaagtccttcttgatgtcctctaccatcatcatgagatatgcttttaaatctaggtctaggttctcaggtgtgttggggttccctggactgggcgaagtgggtgtgctgggttctggtgatggtgagtggtcttggttcctgttagtaagattcctccgtttacctttcgccatctggtaatctctggagttagtagttatagttgactctgtttagagattgttcttctggtgattctgttaccgtctatcagcagacctgggagacagattctctcctctgagtttcagtgctcagagcactctctgttggcaagctctcttacagcgaaggtgcgcagatatcttgtatttggacctcctcctggccgaagaagaaggcccaaaacaggacctttctcagacactgtgttgctttggcagttcccaggtggtacagactctcacctaagcatactaaattcctaagttccttggagtcccgggaccaagatggcgaccgctgctgctgtggcttaggtcgcctccccagccgggcgggcacctgtcctctggtccggaaggtggtcggctgtccccggcccacacagggtgctgcctcagcgcctctgtgcttctgcctgttccagaagctgtcaggttctctggcgcaccctctcacctgttcagactaatttcctaagttcggcgggtcccggaccaagatggcgaccgctgctgctgtggcttaggccgcctccccagccgggtgggcacctgtcctctggtccggaaggtggccggctgtccccggcccacacagggtgctgcctcagcgcctctgtgcttccgcctgttccagaagctgtcaggttctctggcgcaccctctcacctgttcagactaatttcctaagttcggcgggtcccggaccaagatggcgaccgctgctgctgtggcttaggtcgcctccccagccgggcgggcacctgtcctccggtccggaaggtggccggctgtccccggcccacacagggtgctgcctcagcccctctgtgcttccgcctgttccagaggctgtcaggttctctggcgcaccctctcacctgttcagactaatttcctaagttcggcgggtctcggaccaagatggcgaccgctgctgctgtggcttaggccgcctccccagccgggcgggcacctgtcctccggtccggacggtggccggctgtccccggcccacaaagggtgctgcctcagcgcctctgtgcttccgcctgttccagaagctgtcaggttctctggcgcaccctctcacctgttcagactaatttcctaagttcggcgggtcccggaccaagatggcgaccgctgctgctgtggcttaggtcgcctccccagccgggcgggcacctgtcctctggtccggaaggtggccggctgtccccggcccacacagggtgctgcctcagcgcctttgtgcttccgcctgttccagaagctgtcaggttctctggcgcaccctctcacctgttcagactaatttcctaagttcggcgggtcccggaccaagatggcgaccgctgctgctgtggcttaggccccagacccacttttctgacccgtgtctggacggatgctgtaccttggtcagcttcaggagtttcttcatttgcttgatagcatcattaacttcatggctcggaggaagtgcttgagaattactgacacccagggaaaacccgccatacctaaaagaaaggctcgccattaaaagccatacccaagccattactcacggcagcagatagcacagtgtacaaggttctcggagagccacctctttttcaaactagaaccaacgtttggctaagataggtacatgttgcctcccctggtgaaatctagctatcttaattctcaaaattgctgcccagtagggaaggcctagagctaatgataggcacccatgctataggcgggaagacaggaagatgggcagtcttgaaaaccagggagggatcacagacaggtgatcttccctggcattaagtaagcctatgactgctctgctcagagctccagggacctgacccctggagaaaaggcagggtggaaaatggaaatttgagaataaaacctttgaggtctttggaacagccacatgggccactcatgacttcaagaatgcttccttccctactctcaactgctccttcaaaatccagtagggaaaaatcagtggaaacagggtggaaacaaatgcttttgatgtctttcctttccaccaagacctcacatcatatgaaaggcctgaaaggttttccttgagtccctgggcacacttgggaatctgtctgggggaaaatacagctaggataggtttttttttccttcatgacattttactttcttaagtctcaagaggcccatgagtgatttctgaaattcctcaaggaaatcactgtatcaaatatttcaggggcctccggagtgaagaatgagttacacaaattccacagtgagtctactataaccgtgccttggtgtgttggtctgcagcaccccagtccccctcaaggtgaggtgacacccaagagtgtgcacaaggcaacagtccccaaacctgtaactctgtcttgattcaagagccctacatctaaatcattctcctgagacctgacgtgactcagggagaatggggagaagggactgacttaccgaaactcgttcacccagatcttattctttaagctgcagagagaaaagacaaaccaaaaatcagatctagaaagcagaggtcatagtgacgaggcaacagtaatcatttacttgaggacaaagcatagaaacgggcacttctttaactaggcctatgaccagtgctgtagagttgcatgcatgtaaggaaggccactctcagcatgtcctgtctgctgtcttagaaaccttactctaatgagaatcacatagtaaattaagccaatgtaaaaacccaccttacatgcaggcatggtggtacatgcctttacgctcagcactgcactcaagaggcagaggcagatgaaactctatgagtctgaggccaccctaatctatatagagagaattccaggacagccaggactaatgtagtgagaccctgtcttaagtaaacagacaaataaataaatgccttacagacccagagaccctgtctaaaacaaacagacacacaaataaatgcattaccatcccagatattactgaactaaatgctgtttattgtgactctcatgtggcaacattacagctctgagaaatgcatggcctattcttattctattatatccttgtcatttaaagttagttcaaacattatggaccggacacctgaccatacttatggaaaggaaacatattctctgcacactgactaaatattggtcactatatgaccatgtcccaggaatttacaagtctctttaaaggctccatatgaaagaaaggctactgtgtctaccctgaccttgtttatggagccatacaggaaagaggatctacaggcttttgctcgtatcatctctcttacccctcaccacgaacttaagagtgcaacactaacatcaaatgtaaaataaaaattaaaattcatataagcgaagatgttatgagactaatgggtcagaattcaaatctgagtccacatttgtcacttattttcagcctaaagcaggcagcctcgttctctaagctgaactttcaaggctcacaagcccccgtatcatcttgtctaactgatatcaagtgctaaatttcccacagagccatgattgtccatttccctaccgctcaagtctacatctgcagcaagccaggtttcaacaggacgatacctctttgctatgatctgcacgtacgtcttcaccaggtaatctgaaatatttcttcctgtcagattctgaaggatgtctgcggttttctgttttctctgtcatcacatagaaaccaagctcacgtatcatacaggtaagaatcagggcagaaaacagacaaaaacaataggaccccagggcctacgcaagaacctcagccagtcaccaccaagaccattggcacttgtccctcgctcataccaagccaaaattatctccaggaaagtattcacttgaatatctagatgggattctccacatcacctgaatacttaaggaagagcatcataaactgcccaatgaattcttctatactttcgagtcatgttggtgagtgggccagatgattttaaagtgacaagcatgacttccttaagttttcacatccactaaaagttccctgtccccaccctccaacctagactactgtcctgaaattttcaggggaaacaaacaaacaaaaacaaaacaccacacacacacacacacacacacacacacacacacacacacacacacacacagactcagatctccctccaaacctcagagcccagagaatgtcagagttgatgagatacacctaagctttgtggcccatttactctgaagtgaaaacacaggcccaaagagttaacagggccagcagctcccactgtggcagcaccaggaaaggaagctgtgcctacagatgctctgtgacaggcactggcacaatgtagctcactcgcctctctcaaaacccactcacttttctcaagagagatcaagagtgacttcacatgtcactcattcttgctgccacacagaggctcccaggtcctaccctgagccaacttctcagtcatgccgacagggactcacctgaggaggtggcagcccccctgcccctgggggacacacaggcagcatcttcttgattttgtcactgctacactggcacgcaggtgaggggttcttcatggtccagtttccattctggaagaggtccacgatgctctgggggacggggctgatggtccagtcctcctccccagccaagcaaggggtatctctgtaaaaggagatagcaaatgttctagactctcctgaaaggggcctgtctttccttgatgctcttagagctcaggtttgctctttagaaaggacccatgtgcctagtcctaccatttgaaaaacagcttgacttcattatgtttgctctcacagaagcctgtggaagctgggaatcacagaaaacccaggaaaataggacgtgaacaggctccagatggtcacgcagagctctgctcaacccagctaaccagtttgctgacacgacacacagaagagtccactatgggctgcacagtgttctgcatctttgggagtctggagaaagcaatgcaaactctctgacttcatggattcttcagggactacaagtcaacaaatccaatcttacataaccccagataaagcaaacacaacaggaaggtacatggagaaagcagacctttgagtcagcttcaaccaaaacataaaaactatcagctagttaaagaattgagataatgggctggagagatgccttggtacataaatgtacctatagccaaaactggattcaatctctcgatcttgttatactctgacctcttcatgtgtatcatgacatgcatacacacacacacacacacacacacacacacacacacacaaacataaattaattttaaaagaacagtggagaatgaacatgccaggcagcacccgtgggcagtcagatacaaaggctctgcaaagaaatgagtgtatgtgtttgatgaaaacaagaaggttatgagatgagctctcagacaatgaggagggaagaggggaggagctccatgacagagtcatggttaggagcttgtatcttaggctcagcatgttcaaagtcttgtggagaatggcaagatccaaatgatgttctataatgagcagagacttgagctgagtggagtgggaatggtcactgtatgaaaggggaggttgtctaccagcatcctcagagacaacgcagggccctgactgtttggtgcgaatcacaagtcccttgcaatctcagggttcatttatccctactgataaaataagagtataaaatgatgtctcatttctagcctctcttccatatttccaattttcaagattccacaatttaaactagggacacaacctttacacctcaggtctgtgcacatgtgtgtgtgtttataaatatgcacacaagtgctttttacgcaaataattcctcattttctctttaaagcctcttccctaaaatatttacccttatgaaactcatacctaagacctttaaaagacaacaggctgagacaaactaaagaccacttgaaaaagcaacttagtcagaattctctatcctaatgatccccaggaacctaaaatttgaatttcagtctgagatggtggggtgaggctctgcctttcagactgcttccagcagagcatccatggtgcacagacagcacacatactttctgatgtcatggacatttcttttatctctgcaggccagctgtcggctcagttctctctcctatagatctggcctttgctggaatcaatccccgaatccatacaattcagcttaccaacaaaggacccagctacccagattatcatcttacctcatcctcctttcctacaaaaccttcacatggaatcttaactttttggtgaagttaaggagaagctgtgtccttctagtaagtactaaggatatttagtaactacctactatggtttgagtcttcaatattttccaaaggctcaaatgctaaaggcttgatccctagattgtggtgttcctgggtgctgacagagcctgtatgtaagtcgcaggacctaagagaagtaagatatgtctctggggacacacactcaaaggaaatcatagaacctcaagccttcttcctcttcttttgctccctggcttggcatctatgatataagcagctattatattgtagggaagcacatgatccctaccacgatgctctacctaactagggaccccaaaggggccccaaacaacacagccaattagctatgaaccaaaagctctgacaccacaagtcaccaataaacctctgctcctcataagttgattttctcagggacagaacattgtctaacacatcatctgatactgtggtggtttgaaccgtcccaaaggctgatatctgaatacttgatccccagttggtagaactgtttgggaaggatcaggtagtgtggctgtgttggaggaggtgtgtcactgggagcagactctgagatctgaaaagactcatgccattcaaaagattctgtttcctgtttgtggatcaggatgtgagctctctgctgctgcctcagcatatccctctgcctgcagccatgctcctcacaatgaggctcatggactcctagcccactggaactgtaattctcccccctcccccacaaagtccttccctctataagctgccttggccatggtgttttatcacagcaatagaaaagtaattaagtaaataataattaaaaactgacaaatacacagaaatattcatctccaaatctgctaggttttttataaacatagccatcggattcagtgctctgacacagactggccatcttcacctttgccgtttgggattcaaatgttcctttttgtgcttctctatcattctccacagttccttagctatctcgcactgcccgtgcatatggacctcaggcataaattctctctggacctgcaaacttgaagctaagtcttctagctccagttcactgcacctcacctctccactggtttaaccacagtgtcccaatgacttgcttcttcagtacatagagagtcaactgggcatatcaccgagtttatttacctactttttaaaactagtcctgatgaaaatatgcaactgtacaaaaaaagtctctgttgttataaaaatgcaatcagtatgtcatctctgttggttaaagaaactgatacgcaaagatgcaaacttcacaccagtctactatggcacgcaagtatgggagctggggtcaaggagagaaggggagagcatttggtcagtaagtgaacactgtgatttaaaatcaacatacagcagagtaaacaaatgttggtaatgatttggtgtacagggtgctagaagagtttatttgttcctaaattgatttggttatcctctggctttttaaaataaaaattgactgaaaaaaaaaaaaaaacctgacagtggtcacaatgaaacaggcaataccaccagaaagaaaacccggcggccgtcatgagaaggcagctcaaggctgaagtgtcactcacgggattgggtttccttccatacagcgggtcccaaagcctggatctttggtcagagcattcaggagttcctgggtgcccatgtcctcgggagcatcattactagagatacaagagagacatccaggtcagtcgctcatccaaaccaggacttggaggcaggaaaagttcctacagaaaacgctctgctaagtgttttctgaggaatgggcttctaagactaaaataaattatatacaaaagccacctgcaaggagcttcaaacatctgccatcagggtgacatacagtgtccccaatgaagcatgtgcagagattacatgtgaaggtgtgcatatacacacacacacacacacacacacatacaaaaatcattgaagatcagtatttcaaaactactttgataattaccacttgacactgacagctaggatattccaagaacagacaggaagattttattgattattggtatgcacaattaaaaagtccaagaaataatgggcctagagcacaaaccaatgtcatgatctgtagccatgggcaatgctaggtcattggctagaaagggatcgaacgaacttttacctataggagatgaaagtgagctagagcaatagaggctaataaacaatctatatatgatctatacatatcctacacacacattcacacagagtttttaaaacgtccctctatattactgccactttctcccatctacagacctacccgtgcatcagaactgaagaaaacctgtactaaacaaggtctcaaaagtcccctatcttctgatttttaacaggatcagtatggaataggggcattcttgcctgaagatgcacacttagctaacatcctaacctgaaagatttactgattagtgaattaaagcatacctgacaagagcctaacaatacaaggggaaatgcccagcagagattcacctgtatttcccagtatcgtttactattgttctttgctacagtattggcttgtataggagcctgaaccatcatgacaagacccatcccactgtagaattgtggattctgactccttggctctcagtatacgaaacactgttggtctgtttcaaccctctctgccctgaggcacaaaggacaaacatacctgacaaatgtatactgctcattatacatccagggctgaagttccaggctggggtacttgccaaagggtggcacaatcaggctgaagaccagggcaatgcaaacaaagacagctggcaggacaatctataaacaggcattggagagggaagagacaataggacacgtttttagaagcctgaagagcaagcccctgaaagtctagccagccccatagcctagcaacacaggaatgaggaatacaggcaaggcctggggctgagttctaccaaggtatttctggcagcttgaagagaaaggagactgaaaattaagcccctttctcccaaggcatttccggatgctaacagcacaaagacagaggctatggtcacctaacagaggcaaaagctgggaatgtcacagagtaaagagtcagagtgactgactctttaggctcaatcctttctcccctccaaagactgaggaaaaaccagcctggatcatagactcaggtagaaggctgaacagccctggactgggagccaggagactgaatcctggttccatctccacttgcaggggtcctatgtgacatcagtaaatctgaggactgagaacatgacaccaactcccccgccagaagcagcagcagccagcatctctcctatgagcactgcgaaaagcataattatctaaatctttccttgaaattccccaaatttcctatatcccttctctgaaaacaacataatgtatgggtcagctaagggatctcttccttcctttctgagaaatttaccctttaaaaacttcagtgattcaatggtaaccctggctgcaggtgtaacttggtagtagagagctcacacaccctgggattccatccccagagccataagaatccaaacaatcactctgattttaatattcctatatttcaatatagaaaattatcactggatgaataattccactggaaagtactgtagtgagaatcagcccccttaatatcctatttcgtagttattggtggtgttagtatcattatcaccattcacaaactagagcatcatggatctgagggaagtcagccagtgattcactgaaccagattccaaatccagatctgcaggcttcatgctcatgctctgagttagtgttgcccaggtgggctgcagggagggcttcatggacgtgttctctataattcttcattttgtagaatgaagtaactttatagctgtctttaactgataagtcagcatgcaaactgtgatatgggggaatcaatgggcctgttccattcctagctctctcgctctcgtcaattaagagaaaaacatacccaccatgtttctaataataagtacactgccaagcacaactcagcatggcgactctcatgttatgagagttgaattttcccaactggtttgtctaaactgtgtccctgccatgatctcctctaaattatagccacctccccaagtaatgtcaaagtccattctaaataaattcgtttcatccccctaacagccacacatccccgctcattttcagatgaagaatttgaagcccagggaaatcactggcatactggcccagcatctctatcttgaccacagtcctagcctgtcttcaccagtccaagaaggcagagcccagcacacctcacctgagcaaagaaacccttccggctccgtctggcaatcagcagcctcttccacaaaagggccacaaactgttgctgggtgagtttccagcccttcagctggtaggagcctttgccgtccatcccactgagcaggtcggtctccctggattctgtaagcagcacaaatggagggttggctataatcagtgtcacctgtctctgtacgactctactctttcctctactagcttcagtagtcatcttggaagctggggtttgaagcctccagtacctcacaggagtaaacaggtttcttgaaaaactcaactttcaactcaaagttatatttctcaacatctgatgagcacagagaatgaagatccctcaggacaagcaaagatgtgcacacaaataacagaagcaagctgtgcccaattccatgaactggaattcacgtaggctggcacatgatggttattagtcttctatcttttatatgcatggtaaaaagtgaacacatttaaaacatctaagtcctgacaatgaaacatgaagtaagtacaaaaaggcagactcataaaagcaggtaattttctgtcctcaccaaaagttgtctagaaatccttgtctgaaactaatgactgctaactgaggcacttagacaagtctacgaattcgtttcatttcatactgcccttctccgtctcaaccacatatgggcacagtcattaaaaaatatacatgtcaaagaacacaacttcctcttttattccttcaaaatcaaacacccattcaatacactttcattcaacacttaagcacttaggtgtgcaagaaactggtaccctacagagatgacaatataaacagcttcagagcatggatgggtcatcttctcatacccatctgagaaaaccttctattagatgatgtgataagggagggtttcttcatgtctgaccagacatgccacattggaaaaggggctctctcatcttttccacttttctttggaacctgttagaatctgtgatcttaaccaaaggcgatcaaagagatagctaagaaacacataaaagacaaactcaagttcaaacaacagaacagagatcctgcccgtgcgaacctgggtctatgtcagagtcattgggatcaacagcatcatcttccgtaaatgggtgcagacagctctgcttgtccccgaaggcccgtctgtttcgtcttgctggcaaagtaccatctaaatggaaaaggaaggaatcctatggtttatttatttgtaagacagcaaaccttcccagagcaaacccatacactaacaatgggattgaatcagaccaatgcaaagggggttagctccaacagccaacagaaagcctacccagtgtgcagccctctcagacaggttacctgaggtctcagcatccaccccgctctcttcagccactttgaggaatatctgagaaattaaagcaggatacaatataagtgagcacttgttttatgaaagaagttatcacttcccagattaggttatggaatcccacgttaggctcttaagataagaaggtagaggctgcatttatcaacaagaattttatcagaattttagagaagctgtttggggcagaaaacatctcctcacgtgtgacagctatcagtccaggcaactctttcaaaaacaaaccagtacattatgtgtgtagatgaaattcatgctgaccctacagagaacgaggcaagtcacttttctcaggtctgtgctcccagacctttgagcaggacagcactgggatcactcatgcaagacaaacgacgaggaaatgagcttcttatcactagaaataaatattatagtagacggacatctgaatgaagtcactgatttccaagcccgcctacagaccactctgtaggaagcatgtgacagaagctcaaaaagtcatgtctacagaaatcccaactcaaaggcgcaagacaggagctttaggatctctactgtcatcacagatgactctactgcacaatctaccctgggaaccagccaaggcagacaatgtttacagccgtcccaggcctgaaggcttgtgatgttgtatctctaaagagaagcattgctacataggaaagttacctgggctttgaagccccaaacctctgattcataatcttaaatcaacatcattattaattctcatcctgctgtgatcattaatgagccttcaatatttaaaaaacaaaggccaccaatggagtgacacagatacactgaccacactccaggccacaccccacacccaggagcagtccaccaacacaaatagatcccatgaacttattttgtctttttaaaagagaaaatatgaagttgggtaggtagagaggtaaggatgagggatctggaaggaactgaaaaaagaccattaatattctggaatatagtctcaaataataagtaaaaatattatttaaaaaaaataaaacacaggggctggagagattattcagacatttaagagcactgacagagagcctggttcaattcccagcaaccacatggtggttcacaaccatctgtaatgagatcagatgccctcttctggtgtgtctgaagacaactacagtgtactcaaataagtaaatcttaaacaaataaaataccaatagtaataacagattaaataataataatagattaaataaatcttaaataaaatacagatactgctacttggaatgataataatgataataaaataaacgaggccaaagtttgaaggtgagcaaggagaagtgtaagggatgatttggaagaatgcaaaggatgggagaaatgctgttcgtcaagtttcatctcaaacaaacaaaacaaaaacaccaaactcatcaagttcagcacctggctccagtcgactggtcataactatcagtcatttactatgtgtgagtgttgtcacccggccacaacactattcactccagggagcaatcctaacactccaacacactgctgtctcccactacctacgctcttacattgtttaacttgggctaacattacccagatgcgaatgccttaaacttccagtaaccaactctattgccatcttgttgccaggctaagtggcctctctggccttgggattgttgagcttacttcttccagggtggtctccgagatgccataactggagatgcccaggtctgagagccggtcatcaatctcatggaagagttccacaaaggctccctccttcgcggcttcgtacggcagcacataggtcagctcgtgcccaatgtcctccaccagccgggcttcagacacgtgcttcctgatgaggttggagatagcagagacatctgcagggaccagagtgggaaggtgttcagtcatcacagactccacagaaagggccagcttgcttctccctttcccaacagctcagaagcaccccgtatataccgtacgtcctaagatgccaaacccattggcttattcgtctctagcaggagggcaaagactgtctcttaactcattcttacgtcacaaaacctaagcccactgatagtcactaggtgtgtgatggatgggtgtcttgtgtctaatgtgtctgtaccaggactcttcaacagaatgagtttagaaagcatataagaccctgcccttctgtcaactttcagatgaggctatccatgatttacctcaggagatgactaatcaaacagtttgtggaagcagaaaccttcctggaaaaagccagctgttgggacagtcagctctatatttttattccatatgccactggtggtactagtctctcataggcactgctcgagggaaattgaaatgttctccctaatctcctgggctctcaccattcttagatgtggagttcaactcccttccaactggcttggccttctacatctcatccagcatctggctaaatccactcccccgccccccaaggtattccccagacttccagtcacatctgttctctggaatcctgccctcccagccccaagaccaagccccatgctccccagcaagtgttaggccaagccaccaccaggctacatccactcccacggccacccagcccagcccagcccagcagcaaaccttgagtcagcgccaccagcctctgcacctctcctcctctgcctccactctgcccagctgcggggagcccaggcaccacctgaataagaaaccccagaatccttaccgatggtcagcgtgtcactttcatggtcgctgcccaggccagcatcagaactgctctgagaaacactgtcctcctgatgacaaagaaggaggtgagaacgggtcaggggtcaaaccgggcatagccgccaccaccacctttgatggacagagcatccaggaagttctacggcataaaactagagcagaaagctttccctgggaagtgtgccgctggcagccatggcttcagagaccactgctgccatgagtgtgctccatatggacggcctcactgaccagggtgagagaagtcagcaaactgaatgtcaacagaactgtggccacagatcaatgctgccactggtcatttgccaactgtccccgcgtgggatttacctgaacacttagctaattgaaagcttcctcgatgtgaatatgcattcagttactcaggcaccttattaacatgcagagatggatccagtaggtctgaacgggggcccaagtcatcatgtgtgtaatgaattcccaactgaggctgctatgctacacttcagaccacacttgaatgaggcctcggctccagttaacaggaaaataaatggatatgagttcaaatcaggtaggagacagggtaggtaggtggcctgctgtgactgaccacacaaacacatctcaaacatgtagcatgtaagaaacacataacaaaccagatccaggattctggtcctcgcttttatgtccttgctgggagaccttgaatatgctacagttcctacaagcctcactcccttcatctgagattataaacataatcctgtcttccctaggttgctctacacttggaaaatataaaatatataaacagaccaaaaatgtactgttaacattatttttttttctaaacccacaggtcataaggggatgggagggtttaaaatcaatatctagtaaatatttggtgtttcatagtttcaaagtcaagaccagtaagatttaaggcagcaggtaggaatggcggggcatcctgtagcaaggctactcttacctcttggcaagttctcttttctttgctaggataaagccctcaaagggcttgtctccataacccagggcacttgcagagggaatataaaggggctgggctagaactagtgtggcgggagcagaggtctcctggccttccacacaggaaccatgatgtactgcaacaggcccacaaagcgaggggaatgttgccttaatcttagcagcgtggggcgccaacgtgcaagccatctatggaaacaagccctggctgcctcatccccacaccagcccagccccaagatggctgctcacctttttcagacaagacacggtgctgctactgtttctgcaggaactgagggacgattccacatctttcttaaccagggtcagatagtaacccgttcccaactggtttttcaaaaacagggaggagcccacacaacacagcttcccatgggaaatgatggcaattctgtccccaaggatgtcagcttcgtccatgtggtgtgtagacaaaataatggtgcggcctgccaggcacaaacacaaggagacaaggagacgggacggtgggacttgtcagttctcactgatcaaagtggcacaaacggcaaagatgtcacatatgagaaagacatggggaggtctttaacctccatagatgtgaccccaggatggcaaggcttggggggatggcagtttacaattgtcacaaaaaggagagcagtatttatttgggatcctgctccgtcaagtgtgctaagaagtttacagacattcccattagtcatggccaacatgaacaaggacatggtctaactacaatatgtatgtgtatgcttataccctttctgctcttctagtaggcccttaaataatgaagtatacgtcttaagaatcttgcaaagccaggtgtggtggcgcacgcctttaatcccagcactcgggaggcagaggcaggcagatttctgagttcgaggccagcctggtctacaaagtgagttccaggacagccagggctatacagagaaaccctgtctcggaaaaaaaaaaaaaaacccaagacaaacaaacaaacaagaatcttgcacagcaggacagaaacggagcttcaaggaggctcccaacttttcttgagaagcaactaacacaatcagccacaattcccacgagcccttctctaccctgggtcatgactggaaataagtaacagcatgtaccttgccggtattttagcaggagttcccatattcccctgcgagagtacgggtccaccccggctgtgggctcgtccagaatgacaaccttggatccacccacgaaggccaaggccacagacagctttctctgcatcccacctacaagacagagcaagacacatcctcaaatggtaagtgggggtaaggcgtggtgagagatgactggaagtacccatctggagacataagagggttaggattctgtcaccaaacatccaggcttgaactctaggtgcttgtctggagaaggaaggaaaggaaggtgtccggggctcacctgagagctgactcgttttgcttttcagcttgctcgggggtaagccaacatccagggccatctgctccatctctgctttcacgtgcttctctgagagcccctttaggcgcgcatagaaccagatgtgctcttcgacagtcagcctgggggaaagaggggcaggtcagctcggggcccagtaggatggatgtaccttggcacagttttcctctcttccacaccgttcttgcctttaaaaagcactcaatttctttaaaaaaaaaaggcaaccagaagggagaattcatggtaatgaatggtgcatatataaggatatacccaacaggcctgatcacaagacaccaggccgttaaaactttaaattccaggttctccattcagttttttttgtgaccatgttagctcagcattcactaatgtgaatgaacctcaatgggtctcaagttctaaagtaagggaggtccaagccattgaatttagaaaaagggaccttaaaacctacaaagtggaaagaaaggctttgcctgcagtcagagggctcaggacattctttgttcctccaccagagagctcaggccttcctctgctctactaccagggctcctttaggatccaacttgctggtgggacaacctgggtgggagcaaacttgagcagagaacacagggccattgtgccaactctcttttgaggttcttgtaccatgccttaatgaatacgctggttagtctacacagaaactagagtcactcaggaagaaggaccctcaattgaggaactgcctctaccatattgtcctatagacatgtctgtggagcatgttcttgattagaggctaatgtgggagggcctagcccactgtgggtggcaccattccctaggcaggtgattctgggctgtataagaaagtaagttaagttagccatggagggcaaggctctaagcaccattcctctgttgtctctgcttcagctccagcctctaggttcctgccctgagttccttcagtgatggtctgtgaccaaagaattataaaattaaataaacctcttcttctccaggttgcttttggtcattgttttatcacagcaaccaaaaacaaactagagcaaggaggaatgcatcaggaagatggctgagctaaaaataaaacaaaacaaacaaataaacaccctccaatccagtaacagagaacatggctttctaaatcccatcagccaatacaccaacttcaccttttttccctgaaattaaaaggcaacttgtcattgtgtgtcaggaaaggaaagacctactaccactccatacccaaaaaagggaaattctctagtaatactctactcataccaccaggactcccaggtcccagagggggttgaggggttgggggtgggaagtgtgggagtgggggtggtgctcctctctgtgcacttctgctactcacatgtcaaacagcacattatgctggggacagactcccaggttctgccggatggagctcatctccgagcgaatgtccttccccaggatgtaggccgtgccagaagttgggggaaacagcccagtcagtattgacctgaggacaagaataacagactcaagaatcaggaggacccagcctcactattcagggctgcagagcctgggcaaggagaacagatcacaccacttaacatgattctttcctttctaatctaatctactccaatccaatctaacagatgcccatggagcagaggccatttgttttagtgagtgggtaagcataagcctatgtcttaggaagaggagtttgctaagagcatctgaaaaaaaaatgacactcttaatttgcaccaggatgtactcctcaaaacatattttgtatgcctaacatcttgtacagaaaaatgaacaaacaagaacgtactgttaaaagaaagaaatgagtgtgttgcataacagaatttctgagtatctcagtcatgttcataacacactggttttatgttgaagaagaaagcctgtcaccccgagaagatcaacctctggaatggcagagggaccacactacaaaccacaagcaaactatgatattctatagcccttcctctgtcctcacaggtccctgggaaggcagagggagagagctgtccaggccttctctcctctgcttggagatagatttttttgggggactgtcctttttcctctagcttgtttgatctttctttctagtctcatgcttcaaatttctgaaccaacaagttcagaaacctcaagattccaagaaagctgaggaattctgagtattgcatgggaaagctcatcaaaaggaaaagactaaaggaaaagacctagcaaaatctagacctcagaaagcattctcgtgattgacacattccttcccatcatgctccactcttagccaagcgaccaattcaatttccttaggtctatgtttctaagtggggatttcctgaggtagatcttgggagagtcacaccctcttcttacatggtggtggtcttccctgctccattgtggcccaggaaggaggtaatctggccttcgtaaaagttgagcgccaagccatccacagcaaccttcatgccatctcggtaaaccttcaccaggttctgaatggacacccccagcctcagatgagtgggttcctcttccatgcagactgtgacaaaagaaaggagacagagatgatcccacaggaaacactgccctgatccgtagagtacacaaatacaaaagtctatgcttagacttttagaactagtttctgtctatgctcaacctttaatgttgtagacaaacacaagatgaaatattttaagccccttggaacacgtgagctgacagtagcaatgaacttataaaaaaaaccacattagtcttttgatgaagaaaggctgcacaaacaattaaaatacagtatgccaacagccattttaaaaacatatctaaaagtatcatggatgtccatactgtgcaatactactcattaaggaaaaaatgaattaaatatatcacaatttgagtggaaatcaaaagaattataccaagtgagaaaaggactcaccaaaacaaacaaacaaacaaacaaaaataatttggccttcatgtgggtaccaaacaactggcatggaggctattccaaaagctgtttactgtacatgggatatgttctactccctgggcagccttgtctggcctcagtgagagaggaggcacctagcctcgtagagacttgaagtgccagggtgggaggatactcagagatgctctcatgtgctcagaggaaaaagggagggggagggggtgatcaagaggagggcagtgagtgggatgtaaagtgaataaataaagaaataaaataaaattttaaaaattgcctgctatccacaccagggtgtaccaaaagctaaccactgaagatctgaggaagggcaaataagagagaccctgacagcataaggaggaagcaggcctattgacagtgtagaggggaagcagctctgacaatgtaggaggtagcagactatggaccatgtaggaaggaagcaggtctactgacctcacaggaagaaagtgaaccactgacaatagagaaggaagccacaccaagaacaaagacacaaacagaaaccctgggaagaacaggggcacctctacctccagtcaggagctaagaggggattagtgccctgtgtaagaaaggatgggaagttacgaagcacaagctgcatctataacagccccctggcattcacgtacagattccctggcatagaccaccccagcaaggcaggcagagagatgaggcccacagtgatggctaactgtagttattcctcttggattcacagaatagcacaattatccaagatgggaaaaagatggttacactgatcaaaacatactttcctagaactgttcctcaggagccagatagggttcccttaagtgcatgcgacggcaatggaagaagtgcatttggagagggtggactgcatggggtttttctaccgtggttgtggttttgggatcacgttagatgtaggaggcatgccctgctctggcagggccacagcagcattaggtgtgggagagtgctggtaagtggtacttactttctgacactcccttctggctggaaccagggtggctcttctcatcaatttcctcaccaaaccagtatgacttggtacaaggaaaataccagggcctgggaattccatactgtcctgaaagcaaagcacaaataacacaggtatgacccaagctggtgcaatctgagcatttctgacattgtctagccaaatcctctttctccttgaccaaccctatgagaaaggaataggctggagggagacggctaacttttgctgaaatctactgggcagatcatatattctgcacctctccacagctttccaacaactccccaggtggtaacagcaacctcattttagagatgagcaaactgaaggacaagtagccctatccaaggtcacttaccccaaaaaataaggactcaagagtttgaatctcagaatatacatgcaaattgcatggtcaatggaggaagttcagatacgggtttaaaaaacatttcaaatgggtttccttggaggagattcagagggtgaaaatgagtcctcccctaaaatctgatctcagacagaaatgtatcctaaagagggttcctgttctgttgtacttggcaaagaagggtaagaaagcatcaaaattaatttttggtgaatactaatttcccttaagcaataggcaagggctaagacccaatatattatattacttataacctgtagttaagagacagatggtctcctagggcttcctcttctggagacatagtcctaagaacccagtcagtactgagaggaacctgccagactctgacccagtatagcccagctgaggtcatctccaagcactgacacttaacagacccatgaccttaggcaagtccctcaaactctcagttagctctctcttttagaaactgtttaccttagcaaacagcccagagtaaccttccgaaccagagtctgtataaagtactttgctcagcacctggcacactgggctcaagagatgtgtagcacaatgccagtaacatgcatgctttcaacacaagtgcctttccttagactatttgtttttcataagctaaaagcccaagccaattcccagggcgctccctcgtccttcagcaactgcaacacaaagaaaggaagaacctacaggccgaaagttgctctgcccctcagtcagccaaagcagtatggaagcctggggtacctggaaagacggcttcgatgtaccatgtcatcacgccatagagaaaggtgtcaaagagcatcatggacactgcagtggtgagattgaagccgtcctcctccaccgggctctcaaagagattgtcccattggaccccgataccttgctcctcgaaaagggcgaaatactcacagccgaatccaaaagccacaggagacagcaggctctgagagaaagaggcaaaaggaactggtctacatccttgcctctctcatttttctcttctgatgtaaattccaccttgagaagtttgactttgcaaattacatcaattataaggcacgtaaatattctcctagagtccctttggagaagcggactcacttgcagcatagaaaatgatttcatttataagcactcattatgcagacacgtttcagaaatgtatgcacgagagcaggtgagaccttagaactgtatgcttcccaagacattacaaggctcaacgatcctgttccccccgtccagctgacattcatcaaggacttttttcactgatcagtcattgaatattcaggatcagagaagccgctttaaggcatcatatctaggagactcaagctttcagcacttggagcatcctgagagcctaatatcgttatcagtgacccagcagggcagatagtgagtggcctttattggtattctcacttgcttaaagactacacacctacatttcacaaaagactaaaatgtcctggtcagggatttgtgggagggtaagtcatgtttggtttttttcagtctggaaaatatttcccaagtcaaacaacacaatggataaaagaaagacaagggacaagaatgaaccatttgtggtctcaagctgtccatggacatgaccttgctgtgagcttttatggccaaagagctagaagttaaggggtggacatggtacctactgcctaaactagatccatttctgaatgtcatttatctccaaccagttcaaggcacaatctgatgatctctgacaaaaaccaaatccaacctagtatttactctaggggcaaaggagaaacaacttagccagaggggagacaggattatccaacaccctggggaggtggaggggcaccaggactacaacctctgcagagagatcagagttacttacagcaaagatcttgatggagaagcccacatagtcctgccaggctacgcacagcacatagggcaggtacagcgtgaagtagatgatgcccccacaggctgctgccaggttggcacgggagaagagcgtgctaatgaggaagcactgtaggatggtcaccatggcaaacacagacaggaagacgaacaccacgctggggtcactatagggcagcaggtttcctaactggagaggaagagtctggataaacgtgtagccttggcaagcccggcggctcacatacgtgatcttaatgctggttttgacatataattctttcagagctaacgcagggaaacccttgtgcttgactttctgatgaggacatgaagcccatgtgaaataacttactggagagactatgcatgaaaaatcacggcagaattatggttaaggacaaagtccaggactttcgacttgatcttagtggataattttgttctccgtctctcacagagagcaaggaatttggcttctccttgtctaaggacaactattgcctctaagaaaaaagtcgtgtgagacaacagcctacgcatcctttctctccaaaagcctaggaaaaaggccaggcaacctgaactttcccctggtaaacacagagtcttcattcatcccaagttctgtggattcatcctctcatcccaagttctgagctctgagctcatcggtagtcactgtggacactgaaccaggccctgtcaacacccggctgacttagtccgttcccacacactggccacaggatccctacccttgtcacaaggcttaggtccttgccctcggataccagagcatgagaaaagagtttgtttcagaacaacatgccaataaatcttgattctgccgtccctgggtattttagtgaggctctgactttccctgagcactcaatgggttattgtaggaaggctccgctgacggagttcacagcatgtcctctgaccggtgcctggcatcagtgagcgctcatatgtaatatatagtagctgctattaggacaaatgttagattctcctgctttgctctcttgctttcttagaaaacactaacttttataagatgcatctttgtatgaagtaactattgaagcaaaaacgcttaagagcagatttgtgtatgaggcaaaaacctcactgcccagactcaactttaaggcaagcaggggaagaggggggcttacttgactataggtaaaagacatccagatgttaggacctctgttgtcatagctaggagagccaacaggccctggaacaccctttccctggtgagtcccatgagcccccgtccagtgactatgagggaaattcttggacaagctgtatgttctccagaacatcccactgggctgttgaatcatggctcaacttctccctctgcatgacccagcgctccacccatcatactaatccctaataaatatccatattccaaaatatgcctcagcctcttcctccagagagccaaacctttaatagcatctgactttctggttgttgcatttacaatcttggaaataacccccacccagtaccagtgtggtgcatgtaaatttgtgaaggagccctgggttctagctacttagctgctaactatcccagtgggctgactggagcaagtccttacccctctctggctttcctcaattcagaatggagggaagcacacaggacacagagatccctttacccccttcgctatgttatcaggccactcaagagttccttgtcaagaagagtgagtgagtccacctcaccttcaagatgaccaccagcaggccagcgctcacaagcagagggatgaggctgctaacaaaccagctaaaccagaggatgccattgtccagacccatgatccgcatggtctccttcagccgagcctccttctcatacacaatgctcttgatgatcacagcgacagagtagatccaggctagagtcatgaagaggggcattgaccggctcatgacccgcagaaaactggaggcacagagaaaaggcatgggaaaaatgaaaagtgtgagcccggcaccgatccaaggccttgcacactggaggacaaacctcatcagggtcgcttatgaaaggcccactgaactctcaaatgaccaaaggtttcattagcagtggacagagatgaaacctgggtttcgagggtatggccgtgcaaaattttttcaggggctctctttaatagctaggaaatggatagggtaatattaagataaatataagttactctactaagtactaaacacaaagggcgggggcagaatccaacttggtcttccgctaaaggtcagtatctctaggatgtcctattgacttgctttcgctctcaaccagtgaaaaacacgcacatacacgcactctctccaaggacctggttatctaagggagatgttggcttgttggtacactcacatgtcatcaacataacaggggtagggcatctgttgcacgtagacacccgttttcttctcagatcccgtcagcactctgatgatggcctgttccaccacatcctgcaagtaggcgaagccgccccagacatagcgcatatcttcaaaagggtcagcccgaggaccagggtcccagtacctgaaatcaaacatcaggtgatgaaacactcatacaaaacacaccccgaaaaaatccaattacccaaggttcccctacacctcctaggccactcctcctatttttctatctcccattcttatcacagctgacaagtacataaattcttggatagaaataatcaatgaaaacactccttctgggtatatttttcttttccctttactggtgaataatattgcacctgatgaacatactgcaacttacttatcagttatttgcctcttcttgtgaaaatacgtatggctagcaagaagactcctagtggctttcctttctttttcctgacttttaagtcctttagtcttttaaacagaaatgtgaaaaaggaaagagtaataatttatagccttggaataacagtccccggcaatggaactttactgaagttgtgccacggctgctttgttgttgacattccttaataaagtaccaccagtcataaaagtcacccaagttacattctggagctttgcgagaccgggtttcatcttacccatccttgatcttattagttctctccacgttgtcaatgtccatccggatcttgtactttacatgatggggcagctccacactatctggagtgatgcctgtgaacacgatgccagcccagaacttcctctcgtccagcagctccatggacttgttgatgagcctgacttctgtcggaatgggttccagcttgttcaggttgacacactgacagacagaaggaagcctcattagaacactggagaccagaaagacaagcagtagccagaactcagcctcctttgagaggcaggaactagctgccagaattcttaatctgcacggcctatccatctctaaagtagttttccaggtttcagaactgaggtttgagtgaaatactcaaagttacttgtattgctttgtgcgagggaattattctcttagcaatttctattctcttagcaacatgtcttagcagtgtcgagtcacagcaactaagcaactaaaaatcagataagaaaaaaaatctagtcagcttttttcctttccatcattttttaggattaaagatttaaaagttttatcagtcccaaattagattagataagtttcataaataatgcctttataacaaagcagtttattatcattaggatctagaatttcaaaacaggaaaagctagaagataaaggacagaaacgctggagtcaatctgaagcaaatctagaagtaagcttatgtgctcgttaggctattcatctggtgtttatcttgctcaccaggcctgcaggatacagctgtacatgacactgcacattcattctaagctctccttctgcctgcatctttattgcaacagctcaaagggaaaaagcctctagcctttgctaaagggtgtgtacagcagacccttacctccatgaatcgagatatcgtctggattgcctggttggtctcattgaaagcttctctccaggtatacacagagccatttggggactgaacatcttctgggttcttggccagaaacgccatgatgtcttgggcagtccaatctaatccatccaacttctgttcccaaaactggtcattgcctctgctgtctaacagcgtctgccattccaggaagaacatgcgaacagtgatcatcaagtgtcatggtaaagagcacatctgacaaagattgaagtttctcatggctgatgttggccaaggctaagtgataagctgagacacaaagtcagacctctgacttcgaagttcacaggtttcccactgtaccagacagcccaggttaattgttttaactctaacaacagtgacagtagggtgctgagggatctataggcatcagaactgacacaacgctccaagggtgtgactttggtactgtccacctcacaaacaggaaaatggaacttcggggatattaaggtagctaaggagctttcggcagcataatacacattgcattgtaccaccctctcttttgagatagggtctggtgatgtcaaattaaaaccttgtctctagactgagtccacttttaatgcttagttcaaggaagtaatactcctggttaatacaaataaaagatcgtctttcctaactccaggacatgggatcatgatgaagaaaagaagacctgccatcacctgtcaatgtggaaaggtaagctattctggtcctcaaccagcctgcccagggggactggggcaaaagtctacactgatgcactgccaggaaaatgaggccactgctgactgggcaaaatggaaacacagctgctatgctccttttccagttcctagtgggagggggaggtccttgctctactgagcaagatctccaaaaccctatgacttccttcatcagtcttcttttcactaaccttgcaagttccccccaaccccgtggctttctgttattttaatgataacatgatgattttacagagtgtatctcctacaatttcattaactactcctttactgtataccatctagtctattccaaattacttgcaataacagttatttcagtaataacgctttctctcccatgatgacttctttaaaattgttgctgtatgatgctaggatagagattccctagtttccactgacagggtggcaattccttaccattaaccccatgccaatcagcctctgtataacagaccccaggagccatcattctgttggtctctcgctaccccctgcctgtccaggtaaaagtcagggctctcctgtaccatcctcttcttgcctgtctaccttaagctgctgccacgcctcctcttctgcactcagcccttgccactcacctattcaatctctgttgaggtccgtctcagccttgcacccatctttcttctagaataccgcatcaacatctccacttgcttaaaaccatctgctctccccctctaaatataaggatccttacagcctcccaggcctttccttccaggctacttcacttctgttacactctcaagattcccctacatatgcatccctagtgaacgccaccacatgtttgtaaggacttgtcccttaagaaccaagacccgatgaacaactgcagcctccaaagtaaacccttgatctaagaacagggaagcccaggcacagtggttggtatctggaattccagctctgggggaagctgaagcaggaggatggccatgaatttgaggtcatctggggcatatagtgagttgcagacaagtctgaactacaccgcgagacactgctttttgttttgttgttgttgatgttgtttttaaaaaagtgtgtttttaaaaagtgagtacatacatgatatgtactcactgataagtggatattagcccagaaacttggaatactcaagatacaagatacaatttgcaaaacacatgaaactcaagaagaacgaagacgaaagtgtagacattttgctccttcttagaattgggaacaaaacacccatggaaggagttacagagacaaagattggagctgagacaaaaggatggactatctagaaactgccatacccgaggatccatcccataatcagtccccaaacgctgacaccattgcacacactagcaagattttgctgaaaggaccctgatatagctgtctcttgtgagactatgccagggcctagcaaacacagaagtggatgctcacagtcagctattggatggatcacagggcccccaatggaggagctagagaaagtacccaaggagctaaaggggtctgcaaccttataggtggaacaacattatgaactaaccagtgacccccccggagctcgtgtctctagctgcatatgtagcaaaagatggcctagtcggccaatagtggaaagagaggctcattggtcttgcaaactttatatgcctcagtacaggggaacgccggggccaagaagtgggagtgggggactatcagggtagcattggaaatgtaaatgaagaaaatacctaatttaaaaaaaagtgtaaggaaatatctacatatgcccaattcaaaatccctttactgtcaaacacagaacaatcccaagaggtagataatatggatggcaaggaaagcaggcctagggtccacactgcagtgtgtcctgtgagagcatcccacgaatccctcagaaaagaaagagtagcgtgcacacaatgcaccgccagtgccaacttgcgccacgactcgccgtgaatgcataagactcgccgtgaatgcataagactgttgctcttggttttctcactcacgtcccgtgtgtaccaaggctccaagttaagcattctgcacaggtgtaacagcacggctgtatcaaaggaggctctggttccttcatctccagatgctctttgatcagtaacctgtcccccaagaggacctagagcacccctaaactcccaaagaagtgcagcctctaaaaacccagcaaccctcagggcacagagattcaattccagtaacctggcaaaaatcctcccttgcttcttaatggcagaagaaataaaaggaagtggacttcctcgccatggcaataagactttgtctaatgatcctgactgagactgaggcccagaggaagtggttaaatggcttttctgttgatgcaaaggcgacagacactgcattccagactgctctctctctctctctctctttgaacctggttgtgtctggagcatgcttccctttcaagtgccccctatatgttaagggcaatttcctcccctccacagcagtggctgcgatgctgtactctctctgtgcctggagaaccagtatccctgacctgtccgcatgccagatcacgcttctgttcccaaacctccttctgagacatggcaggctaaagaagatactgtgcctatcttagtgactggagaccaaatgaaaatactctagtgtcctgcaagcaccaatttctgatcttccctgggttttgtgccatttctttgcaagactccaatttctgatcctcactgggttttgtgcaaaactgctactggaccatgatggacagcgatgctggcattcccagggctatcactgcactaaggcctttgcttctacagaagtggtggctgtgtggcttcagctgatctcagttgctttaacttacagaactgtgatctcagggatttctgggaagatgtccagaaatcttttctagatcaagcaagcaaatccgagaagagagtcactcacccggacaaggtccatctcttggctgttctccatgaaggtccaaatttgggggctgagttcttcccacatgccctccaggtcatggaacacagccaactcctgaaaggtcttgttcacctacagtcaggtagggaatcgggattcatacaaatagaagagaggcagaggcaatgaacattccaagattccctaaaaaacaccactcattacagaaacctctgctcagtccttcccttcctcaagaaacccctgctacagacatagttcaaatactcaaggctggggatatggagcccaagattacatgtggatttgttttgttttgtttttgactatttaaaagccccatcatggccaagagtatattcaacatacactacctgaagctgcgttcacttcctacccctaattctggggagattttggggacggagtcctaagcctggacagcttacctcagccatgacctgccttgtagctggtgtgtcaggtgtatagagaatctttccaacaagcagtggcttgagtgccttccaaataattcgagaaagaggactagactccaagttcttcatcaaatcattgcaataaggagctacaaagaagacggaggacagacattcacgtctatatcatggtcagttgccaacaggaacttagaaggtttgggagccatgcagccagtccagggtgcaaatccccctcccacatcacctatcagtcatgcagcggataacctccttatgtgagcctcagtttgcgctgctatagaatgaaagttggaaagttcgtaacatccacttgtcagagctgtgatgagaattagatggggtatttccagtgaggtctttcctcagtgctcgaaagaatcaggcctctctcagactcacatctgagctgatctgaaggaagcttttgactacacatgccatcccaactctagctccacaccctcatgccagccctcacagtgcttttcactggacacaagcaggattcttcctggggaagctggaagactgcatttacacttttgtttgaagaggaaaaagccaagtctgtccttagtaattaatagatcctaccacaactaatgtttatatttaacaaaaattaaaaactgaaatatccaaagttcaagaggacagaacgggctttgcttggataccacacaacgtctctgagctgcttgatacacaggtgataaaataatgataaaaaaggtaatgagttgggggtggggcatactagaaatgacccatggcctcactaggggtatgcaagcactctatcgttgtgtcctatctccaaggctggaatattttcctaaggaaacaagccctcaattatatctgttgtataagcaagagatgtccttggattgatctgcaggctggggaagaagagctggtttcataaaactgcctacattaccatcttcttcaggcttctaaagcaacttgtaaagtgctagagtgctgagccccagagggcacaggctgtgttacagccacacatgaagctgtctcacttcttgcctgcggttggaaatcaggaatggcttagctttgtggtgtattcaaggcaaagatgccattgttagacctgtagcgctggacaaatgctacatatgaccaggtgcaggacagacacacttccacagaaaactgcccgagggtggtgactagatatagagttacaggtctctttaacacccagaatgcaaaacaaacaggcagctgaatgtgtgagtgtgacagtgcaagcatgccaccattaatgaggtagttcacctcaaaaagccaagaggacttagacttgaatcccagctcttggggattacctagaaatgcaactttaaccaagacacttaacctctgggcctatgaaatttgaggttccagaaccttccttgcagggtttctgtaagaatcaaataggtaatttaaacagaatgcattatgcataggaaattttgctttaatgttaggttttcctgtagctgttgtaattgctattattaccattacccccttttagatgtttattgtaaagcttgcctcacagtaatataataataattatagtgataattataatgattatactattttataattattctcttttataataatatgctaatttataacaattatgataattaaatgtaataattaaaataatataaaattaaaatatctcatcatttttaggaggttttctggctttactcaggtattaatgaacaacaaaaatgatacgtattttatacagactgatgttccgatacacgtatccgctatgatgtgattaacacaacccagtcaagctagttaatatctccatcacttcatgtagatgcccactgagtctgtgcagtaacatcaatatgaacttccttacaaagcttacagatataacacagtgttaccacacccttgctaccttatccatttgctctccagcggtatgcatttttgcacaagtgaactttgcattctaaccaacacatctcatctcatccctctactgcccccagcaacctcttttcttccctgctttgtgtagctttttttttcttttagagcccacatatgaaaagaactggaaagactagctatcaatcacttattcatcttttgggtattgttactaaacacctgagagagatcaggcccctccattcacagaactgagagagattcacttatcaaggactctgtacttgaggagcaatgtcataagagcaaacagagaggacaacctttgctactacacagaataaaggaaagcatggggtctgagtgacacaggctgagccagacctgagctcggaatgaggacacagggacggggtgacacaggctgagccagacctgagattgatcggaatgaggacatggctttggtctgcatagtcaactcacttgtagaattgtcatagaaggtgtccacgtcttcctcggtgttattccctccaaagagggctttgtagttgttatcctcgtaccagttgagggacttgatcttcaggcccccaccctctgggtgaccacacacgatgcgggacactgcctggtagatctgggtggaggagctggagctgttcacgttggtcagaaacatcacctcctgccgcatgtcgctccagctctttgtgctgaacagctggtgtcagggtggaaagagaaaggagaggggacaaagggacaagcaaaggatgggacaagagagaagcaaacactttattctcttaacctaaaagcagtgttgcagaacatactgtgtctagctagcatcaccttaaagccctctggtgattagccaaggccttcttccctccacctgtggtgctgggacctgcagtatcttattatcccttgctattcccatctggtggctccccctagcacctgcttgaggagagaattcctgcccactctccttcatcatagctctcactggacacattctctgtgacttgcccttggctcacaggggagggtaaccattcatcttccaggccaagaagagtggttgcactgaaggtaagcaaatggaccagggccatgcagtctccatttgttgcaatgcccccaccctccttattctcgatccagcctcttcctcagtccaacagcaagagtgtagtcatttgcaaacatgaagccacactaaacaccctcttttaactcctctggcttccttcatggaccttaagtgtacgctctcaagcacacggttcctgtgactggtatctgctgcccttcctgtgcagtgtcctaacttctctaggaatagagcaccactgtctttggagtcaactcactctgctcttttaaaatggcatctcatccctctttctacatcccttacatggtttattttttcttcactgcacagatgcctgcggtcacatcatcagctggactggtttatttctgacttccacccttccgtgggctaaatgatggtggcgaggtgactgtgctcactgcagagctggaatagctggcaaggccaagcacctgaccatgcgaccaattaactctctacaagactgtgggcaaagacttttctgtgccccagtgccatctgtgaaatgggcacaataaaaggtgcttcactggaccctgaggatgagccagtcatatgaaatcaaacagccacaatccatctatgatatcttgtgttttcctgtcaacagttagcctttgaacatagcaactaagtttctttctaaacatggacctttctaaaaatgcatttctttattgttactcagagaaagcactgagagagacatgaccaaagcggcttgagggtgacctattgggagaagtggttgcccaccactgatgtgggaacaggagtaagcaggttccaagagacagttaagaaaaatgtacacagtacactgctagaggtttccacccattcagccacagggcacatcaagggctttgcaattattttgttttagcccagaataaaagcaggtacaatgatagaagagaaacttgctgccacaaaccctgaatttacaggtactaccccaccactcaaccacccggccactactacacccacttggctttctccaggaatgagcagcagaaaatgagacaaggaggggactctccagagcactgtcaacgcacaaggccttatggaaacagatggactttctctttctgccctttggcagaaccccaactggtccagtttcttggcctatccaaaggtcactcaccctccctaacagaggaaccaataacaggctgacaaagtcggctcctaaggggaggagtatgagagcaaagcccctctgtcaaagatggctgagcagagttacaataaatggaaggaaggaaggaaggaagggagggagagagggagggagggtgggagggaggaggtgttgtgcttggtctcaggattttctaaactttccaggtgcactgcttgttcactgatgaacgtgaaatacttttattgtcaggaaacaaggtaacttttttgatattcagaagggaaaaaagatgatacaagcatggaaaatgagctaaagactcagttaaaaaatcaggatgggccaagtctgagaaactttccccccatggattcctgtattccagtgtcctgagcactgtagcctgccttgagttctacccatggccaatgggacagacagtggtgggatccacaggcaaggtgaactgtgatcaaggttcactctgtcacatgggacaacatgtagacctaacggccaaatcagctcagcactcactaggaaccgaattcccaatgctgagcctcagagaccagatttcccaaggcaaaaagcagggcgaggaaagccacagcgttcctgttggctagcagaggtgaattctgatgcaatggctgaatggtggccttgctgttgaagaagcaacatgaagaagctgctgtcaaacagagtcagtgcacagggtaggaggtagatcgagagacagttctcttcacaaatgtacacaggggcagaaggagctcacagagaaaggtctagactaaacatggggttctgaggcactaattatctctgcaacattgatgtattttagtttcttcctctccaatggagatcaaacctgattcatttttaaattacttgtgcttctaaaatttagtttgacgcagcaggtgatattcaaagtacaaggaccctgttgtcagaactcagaactaaagaaatgacagtgattagtctgtccactgtggcttaaaaaaataccacttacctcttgggccaggccccccaagctgtcaagcaacactgtggtggcttcagccagatgctgggtcgggagatgagatgtggaatttagttttgtctagagagaaggagaaaaaaatcttagtgtatgagctcaaatgcaggcttaaaatctctacatagaaaataaataaatcaaaacaattcctaataaagattaaatttaagaaacttctagccaaaataaagaacactggataattactctaactgcatgtctgtgtgtttcttttcttcagataaggatttcttcttcatgatggtttcaggagtgcaaattcaaaggctagtgaatagacaacatatacaagtatcttatgtggtacacacaagtaggcacaggcttgtgtgtgtgtgtgtgtgtgtgtgtgtgtgtgtgtgtgtccatgcacgtgtgtgcacgtgtgttcaataaaattctaacctgaaagtcccaactctatctatctacagttctacaagacatttgtttataggcatggcctgagaaaagagtgtgtgatggttcacaatcaatcagtcaatcaataaagtaggaaaagacaaaattcaataataaccaaagcaagagaacaattctccttttgttctgttgagtcagtagattttcaccatttttaaatactggagatgtaacatagaacactgtttttatgtctagtgttagtcatcaccttgtatatactaattaacataatacataacctagctgcacagtaaacaagagaaaataattaattagacccaaaggaaagataaattacaatagaaagtcggggcggggggcagctgagacaaaaccccacaggctgtgtaaccagaattgctgtagaaggaatttcaacttcagtcccacaattaggaaggataaggaagaaagtctccaggggaaaggcagcttttcctagtgttttcacaggttctgttttgttttattcagtagtttatctaataccttgagaattttagaccgttttgacagcaattatcatgtcaaagattgctgcgagactggaacagagagtgctaaaagtgaacaggactaacataaggaacagcctcggagatgttttctatttgtatgttcttttttattattattggatattttctttatttgcatttcaaatgttatcccctttcccggtttcccctatcccagaaaccccctagctcctcccccctccccctgcttttatgtgggtgttcctccacccacccacccactcccacctccccgcccttgattcccctacactggcgcatctatcgagccttcataggaccaaggacctcttcttccattgatgactgacaaggccatcatctgctacatatgcagctggagccatgtgtactctttggttggtggtttagtccctgggagctctggggggtctggttgattgatattgttgttcttcctgtggggttgaaaaccccttcagctccttcagtccattctctaactcctccattgaggaccacatactcagtccaatagctggctgtgagcttctgcctctgtatttgtaaggctctggcagggcctctcaggagacagctatatcagggtccattcagcaagcatttcttggcatccacaatagcgtctgggattggtgactgtatatgggatgaatccccaggtggggcagtctctggatggcctttccttcagtatctgctccacactttgtcttcatatttgctcccatgagtattttgtttccctttctaagaaggaccaaagcacctgcactttggttttccttcttgagcatcatgtggtctgtgaattgtaccttgggtgttccgagcttttgggctaatatccatgtatcagtgagtgtataccatgtgtgttcttttgtgattgggttaatgcaaatcaaagcaactctgagattctacctcacaccagtcagaatggccaagatcaaaaactcatgtaacagcagatgctggcaaagatgtggagaaagaagagcactactccattgctggtgggatagcaagctagtacaaccactctggaaatcagtctggtggttcctcagaaaactggacatagtacctgaggacccagttataccactcctgagcatatacccaaaatattctccaacatataacaaggacacatgctccactatgttcatagcagccttatttataatagccagaagctggaaagaacccagatgtccctcaacacagggatggataaagaaaatgtggtacatttacacaatggagtactactcagctattaaaaacgatgaactcatggaattctgaggcaaatggatggaactagaaaatatcatcctgagtgggatgtgttctttaaagtgagttccaaatgcagaatattgagttatgaacatcacggtctcagtggctggcgcagtcctgtatgcacatttctaaggacatctgcttaggagagaactagagctgctggacacatggcttctcctgggaaagcctgtgagtaagagccaaattccagagcttccacactcacattcctctgagggacctatggtcaacccatagatgctatacttggggaggcctgtgatataactcacagatcactacaaaggctgttccttccagaggagactcaggagcagaaacagtggggtgctcagctctcactttctctctcccagttcactacttaactgaagatcgatcagcacggcacagcagaagctgaaccggtgatttccctcagtcagggaaatgctcaccaacgaagaggtcccaattagaagggcaggaggtaaactagttttgtgtttagcatggcccaccactattgattttgaattaatttatgattcaagattataaatcaaaaataaataaggacaaaacaaaatttccggagtcagaaatgtaggtggatgcatttctcttttgaagcctacagaacccaaggcaagacaactcctcccacccccccagccgccactgccacccccactccgtacctccataacctcagctattccactgcagagcggcagtgctcagtgcatcacagagtttcataaacactgactgcaagatgcctaccaagtgctttgagcagagtctgccactcggtaagtttcaggaggaaaaacactttcatctcccatttcttcccttccttaaaagtagcctcccagtgctcaggaggacaaccatcctgcctctgtgccttgccctgtgccaggcaggtctacaagacaccaaatgcctgagatagtctaccctgttaatatagtgagcactccgtcctatatagcttctccatctgaaaaaatttgcatcttcctaagtagtgaccagccctcaatttggtttttaatttagacagtttagagtaagcttattctccttgtttttctacaattcaaaaactgctggtatgaaccttgcacccctttgagtgtaactagccttttatgcaagcacaaggacctctactatgaatacgggagctttgataagcaatgtcttatgcgatgatttgatggtcaaaagtctaagtctgttggcttaactgaggtattggggtcttagcctcttattggctaaaccatccatgtgtaatatggtatagcagtcaatgtcaccgtgaaggtcagggctggtgagatgaggaaggtgcctcctgccaagtgtgctcgacctgaatctgacatccatggtggaaggagaggactgatgtgcacaaaagtgacctctgacctccacacatgtgccacagcaaggcagtgccacacacaaacagataaggtgtagttttaaaataacttgtaaatagatgttcagtatactttaacaatatcggcgacctgcagttgatacaaacttatgtgcgaggcacagactgacataacagagctaagatatatgcacacaattcaaattcggcatcagccaatctccagcttggattatccagacactttttgctccaggcctcactgcacttttttctttttttaacttggatcttacagaatccaaagatgttgctggtggcatcagcagaatataatgcttcaaaccgacagtaaaaagataagctattcagaactactcctggctcagctagatagtcaggttttccgtcttacctcattatttacaaataaagtcttggtagattacagagctgaaagaaataggaaagtttaaaacaaattggagagaatattagaaaatacaattgtgaacttgagctcagaagacttttaaacaaaatattaaaaaaaatggattcaaccaaaaatgagaatgtggatgtatattttaaatgtaaaaagtgtgcatcaaatgatttatggctataaatgacctaaaacattaagtcaaagactagaataatggatttttttacatctttagtataaagcggaataccagctatcgtgtaatagaaaccagttacaaatgcattgacgatgcttgatctccaatccatggggcttcccagaaagcacaggggcagctcagcaaacacgagtacacaatgtgaacccacgcaagcccataccaagtgctgctgttgacggtgtttaaatatgttcatgtaatgttcaaaaacatgcaactccagaattggggttgccgctgggcaacaggcagggttacagaggtaatagtgtgatatctatgatggtttaatttgtgactacaatctgcagtaaagatggccgagtgaggacagcagcccacaggggttgtttctgtcattctgggtatatatatatacacacacacacacacacacacacacacacacacacacacacacgtttgacatgttttccaattttctctttaatgcaatacaactacaataaagggggaagggtggctttgtagacatgaagaagagagcgcatgtcacatcttaaaggcagctcatgtctttgaatattgctagatcttacaggatacagagatgtcgttggtggcatcatagctcaggaataactgaggccgtgaaacttgaacacggaatgccatccacaccggcaactcactgtgccctcctgctcgcacctcatcggccaagacagagcttgccacaacactgctccgcaaaactctgccgatgaacttaacatgctcagtaaggcacagctcagaattcctgtttttgtcctgactaaaaacattctcttgactgtgaattcaaattaagtccctattgcccacaggaagaaaagtattttcctgcacagagtaaagaggaaaaaaatacttagttaaggactgtaccttctgtatttagctcaacaggaatccgtgcattgtctgatatatttagaacataactaagtactgtaatatcatagaatacaaactcttaccttattactcaaagacttccacccattttctgtaacatgtatacacggtatcagaacagtatttcctaaaaggccccaaatgacaaaggctattctgtccccatcctccagcagaggattgtgtctctcctcactggcttaatagttatgctgtgaaagattgaaacgctttaaaggtcgacaacctagaagtctccacttggctgaatactgagctggtattttaatcaatacagggccatgcatatttgttagcatatctcagtagatgttttcagaagaaaagcataaagggaaggagacacatcttagagggaagaactaagccagtgtaatcctgcctcagaagctaagcaaatccctagaagtgttgtcttacatgcccctcctcaagtcacgaaccactggaacctgccatggctgcccttggtctgaatgacatttagtgctctgtcatgaatcacacaagtccgcctggatagacttcgtcctcttccccagcatcacatcccatctctgctcctcccgtcaatgtcccctctatcagtacatccaacccaccctattcccctaaacatctcattctcttcctgttcccctcgagactctgcacaaaccatgttttcttttagcagcattccctatttttattaacatccattgtttaggcctctaaatagaattttgtgtgcctctttgtaaatgcattttacacaatgatctctggcacgtgtccgactcctcttttaagttgtgcattgtgccagtggtctataatcccgacattcagctgtgaagtatgaggatcacaagatcaaggccgacctggaccatctatgaagatgctatcataaggacaacaaaaaacacctttccctgaatgacttcccaaagcaggtataactccagctctgcactcctcttgccctagattaaggattaataagctttcaacgcaaggcctgagtgatgattcagagcacttgctgttcatccagaggttctcatgctgggtttgggtcccaatacctacatggcaactcacaagcctgggtaaccccagtcccaggggatccaatgcccttttctggcctttatggcaccaggcatgcgcatggtccacatgaagacataaacataaaacacccatacgcacaaaataaaataaaaaataaaatttggagggaaaaaaacagctttaaactgaaaacaagtcagcaatgtaccacaggcaagaattatcctaatcaatcagtctctaatatttccatgatatttatggccatcccacttggaatgtacccaacccaacggagtctaatatttccatgacaataaagctttcctttgaggaacattttaatatttttattaaaatggggaatgattaacctcatgtctaaaggaggcattaacatataaaaataagttaaatatttagttttatattaaatgtgtttcataccttaaaatgtttcatgtttatggtgcttctaaatatagttcaatacacttattagcataatttagaagaaaacaaaaacaagcctttaccttaaaagccacagcatttctccagagcaaacatagtataattaagacacacgtgtttgggcagagttgagcagtcatgttagcaaaacactacgatattcaccaatttatccctcagtttgtacagatgagcacacggcctgagagtaaatcgtcacagcttgtcactgcaccacataccaaatgataagagccaccgtggcttagagacaaaggcataccgtgcaagcagctagacggtaaagccagttcatgaaaaactttccacaaatgttcaagtcttacaagcaacaattcctccctacaaaaacctacataaaaattctcctctacaaaagcctacaataaataaataaatgctgcaagcaaggtcggcgtgtgacatgctaaagtactgaacccttaaaaatcctaagcagagctgagtcaatggctcagtggttaaaagtgctcatgacagaagcatgagaaccagaggtcagatcccagaacccacacagatatcatgtgggcatggcagcctgcctgtaaccccagccttggaagggagagatgagggcccccccaaagcaagatgtctaatgagacaagtcatgccgacccttcttcactgaataaagtgcagaagaatgactcccagcatctatttctgacctacatgcacacatatgtatgcctacacacatacacatgtacccaccttcatacaaatatgtacgcatgcctgtgcgggcacatgtgcgcgcgcgtacacatacacacacacacacacacacacacacacacacacacacacacacagagcaaatgaagaaaaggtcaccaagcagaagataatatcaagccccatatgtccttttgagtgtttgtctacagaaattaagaacaagcccagatcttccagataaggtaactccattcgcccattactcatttgcgccttggagggcagacagcccagctgtgaggtttctggtcttccagaaaccacaggccccctaatataagaaccaaattctgccgtggtaggaacacatagcatgaaacacaagacatttgaagagagttcttcattccatagagacaggattctcccttttaggcagatggtattcttagaggtcaagatgacctaataagcgtagtcatgcgagctatatccaaggtgttgctgacatgagacaaatctgtggtccttccttccaacctcaagattcagacaccattcccacactactgagacgacagtgagacgggaccagagccccaatctatctagggcaagtatcacttcaccccagaacctggaaagaagtccttaaatgtactgcctccaccttttatttttcctttacatcccggtcttaacaatacacagtgaatattcaggattaccagcatgtccatgacctccgttatatttatcctagagacagacagggttccatcaatcaatctacccttgtactaactggaaaaacacctttttgagaacctcaactaagtagggttcctagaacaattctgacgtacagcactgttcagcaagtgagttagtctggaggttggtgtgtagttggtgagttttgtttggggtttatgtccagatctagacaaaaaaaaatatcattatgcactgaatatattctccaggattgctttgtttattctgcttctgcttcttaacactgaactacaaaatgaaacatctgccttaccagcaactgtttttaacatgcaatttttattatttatgtcaattaaactatcagcttctacttgttgagcatctagtatgcaccggcctcttgatatatctacatagagatattaaaaacaaataatcataataaatgataaactatattatctctatataaaataaaaggaaatggaggcttgtagaatctaagattttgttttcctaagtcaatgacatctataaaaagctgagccaatgtttgaacccagatctcattgacctcaaatcatggtcttctaactctgccacactgccccatgttatccagacgctattaccctaaccacctagaggagaaccaggagaaagtcacaatatttttggctgaaaaatggggaaatacccacacctaaaataataacaatacaagtggaaaatatttcaaaacatgtctcttatgatgagccctttttgttacagaaatggcacattaacagaacagtcttctcccatgctaattgggtcacgcatctggctgttgtcctcaaagttcttggcacaattaactgtccatcagcacgattcagcacaagtcacatacacacacacacacacacacacacacacacacactgaccgtgacaaattaaaatttcatcagagtagcaagagaaaaagtgtgcttattataaaccaagcaccagtcccagtattccaattaaagcactgcttaattcagtaagtaacatcacagaatgtttgaaagacatcccatcccagaggcagcttccaaaacattttcacatagcacaatcctgatcactcactatcgtcttcaagagcccccatgttctgactttatgagcgacggttcccagcagaagcgaaggggcagaagcagaattccactctctacacccaggagacatgcagggggtacactgaagccatctaaattgaacctactaatctacaaggccacaacaggacgggatgtcacatggctgactggtttaaaggtatagttccttggtgttggaaaccctcccaaaggggaagattttcaagtcgaaatctgagctgttaacagacagatgatgagggccatggtggtactctgccaggcagtggtggcgcacacctttaatcccagcactcgggaggcagaggcaggcagatttctgagttcgaggccagcctggtctacaaagtgagttccaggacagccagggctatacagagaaaccctgtctcaaaaaaccaaaaagaaaaaagaaaaaaggaaaaagaaagcagttcagatactctgcaggagaaaggatttattgggctgtaaacactacaggtgttcaatgattaaacgggaatgaaatcaaataaatgggcaccagaatcaattactgtctcttcttaaataactcatatttcctaaacttgaaggctaagtgtttacctctgtatcttatagtgataagtgggcaaagcagtccccaaacacaatttcatatcacacctttcacgacatttgtaaggaccttgaccctttgtgtctcacaaaacgtcaagcgcagagattggcagcagtacacttatctaactatgcagtgctattgctcagagcactacaaacatctccaataaagaaatacatctcacttgaaactacagtgataaaggcaataaccaatggactcacaggccaccaaagcaagcacttggtagctttaaaaacctgaaacataatgaattactttaggagtgagaaaacattaggctgggcacaaaaattggcatgtgtgcactccacaaaagcacctagaagaagcttgtcatttggccaccccctattcttcccacaacagctgcagagttgaaacatgtataagaacttctcccgggtcagttcagagagtctactctgagatgtttctaaaacccacatgatctaggcttggaatgctgatggaaactgaccgtcttaggaccgcataggaatgtatggttcccttactgaaagccagcttcacagagtttgacatgattacagcatcatcttggtataatgaagaacacatgtcttcagagaacctactgacacaacagctctccctggtacacagaaaagcagagtgctggctactgcagatgctactggagtcattttgacaaagatctcagaaaactcacagatctctattgcagaatttctataaccaaccctgataatcaatacacgagggctcacttgcattcctcggttatggtttgttttgtatgtctttctaatacatttttgtcattgtttgagctaattatttttatgtggtcttacccaatcccaatgttttattatctaacacaatctccctcttctactggttttaaaaacactaataagtagccatttccccattaatcatttcaagacattttcttaaacctggccggggggagggcggtctttcttcaaatggactcttcctcagaaatatatttttttaaaaaaacatgaaagatggatcttttctggttgaaaccagcaccagagaccttgagcctggactctgccacacccagaacattcttctccaagtcacccttgggaaatggactgaaatttgaaagaacacccagagtatgactgggctaaattatatcaccaagttccagccaggcccaagtttctacaaaaacaagatgtgcagtccaggaaaagatttctcattctcaaaccttcagcactcaccacaactggcttcaggatgtccatgttgtagcgcagtactctctcggctgcatcgagcttcttcctcggtagaccacagagggcagaaacttccgcatcaccaagctgaataatttcttctaattttgatccgttacacagactggccaaatgtaattggtagccttgcaaaaatacctggaagggttggatgtaaacagagctgtgaaaaaattatcaggatggaaggctggctcccagacactttggggggagtgtaacctcagtacatcttggaagagctgaagcaaagcactactgcagtcacccatggaggaaagaaccttgggatgaatcggacacagtcagccatgttccaacactgcatgctgactcaatgcatcccactctcttgtcccaatagcaccgggaaatccttaaggcaagtctttttctcaacgcgactggaacacatgactcagctaatggaaacccagagtctaaacccctggaactatgagaggaaggttatgctaactcttccagaaatgtattgatattggacgctgaaattaggctgcctcatggaaacaattataccgtgaatctgtaggtttagatacttgacaaatgcataaagctatgtttaaggaacatcacaattgtgagtgttttgttttacttgcccccaagaagaatacggaaaagtgggcctctatcaactcaactgtaaagtacttctacgtcatcctcacctgttcttcatagcaaaccccaggaaactctctttggccatacgctcctacctagctacccttcctaggtttaaataagtagtgctttttcatacctgagtctcactgtccagcagagagagacctctgcaataatatggggctgccttggtttacaaggctcgtacctgtgtctataaccctagaacagtatttgttgaatggatggcttattacaatattaccaacccctctatcagcttaactgaacgcagtccattctggtcacagaaacctgtagagcatcgcaaggggcgaaaccaaagcctctcaactcccatgcagtttcgcaaacagtgaagggaatctgcgccaccatgtcgtccactcgcctgtcactgactgccagatactcaagtacactccaagcttgctcctgccataagtccttgtcaccatgctgtggtgaagaacccctaagacactgaaactcaaattaccatgcaaagaccttccctggatgcctcttagtttaaactgatggcatgcaacagatatgaaattggcagggggcaatggaaattatgctaaatgaaatgatttcgaaagtctgctgcctctggcccacctcccagccacacaattggtaaacacaagacatattttcccagtttcataagagcatgcagtaagcacattttcttttttctaacttggaaaattttcagccatgtgaagcaaagccctcttcaatcatcagccccgcccatgacttctgcttactgtaaagtcaagccagtatagagccgaaaggctgtacatggggtcaattctcctttctgccagagaataaagtgaagaaaaagctttcgggggaacaacatatagccatgcactctgcccaggagtggtacaaaaataaatgatggcgaagaagttctctaggaccctaagatgcaaagcctatgtaaacactaatattacatacacttaaaagttgatcagaagtctctttatgcagcttccctgtctttaaaaagcagtaagtgcttcatttaatcttttgtgatagattccagtttaagaatctacgtctctggctcttatttcagaacaacatttaaaaaaaaaaaaagcttcttaattcaccttaacagaaaatataacccctttaggggggagtcattacaatgccaaaggacagacacagaaatcaacttcctttcagcatactggccctgatgctgggtgacacaccccactcactgtagggttcgtctgtgacaaccagagtcacgagtcaaatgagatgaaactaaacttctgaagcctgaccatttccttcacagctttttcaaaggccagggtttttctttctttctttccagggcccccaacagggtaatagtgaggccccactgatttagctgaaggtagtagcttaccttctggagaccaacattcgcctgcagcaggctgtccacagtagatcttggaagggacaaattgtgctgcaggaatccagagaatgtttcattgtccaccagaaaatcctggagcttcaaatctattggaaaattgtgtttgtttacagttaataactcaaaaaaaaaaaaaaagactcaaccgctatggggaaggtggagaatagaatattgattgcttcattttaaacggatgggtgaccacaggcttctggcttacatacaccgagaagtgagtttcaggagctccgtctcgctggcagagacatgaaaagattgctttctgatgacatgttgagccacactcagtgtgggctcccacagtccaacagcacagtggtgttgttacacacatggtctttccttgttgccaattgaaaaaccaacccttttaaatgatctcatccatcctacctgaggtttgtgacatgagccctgctgctcctgactcctcagtgccgcctcacgtagctagcactgaaaatactgagtgccttatttccacaagccacaggggctaatctcccagatcagcaggcaatggctcgctaacatttctgtgaaccagaatcgcttgatgggttgcctcagctagccggctggacagcagtctcagagcatctgcttctgccagctctggctgcagcagctgcatgtctaacaagctcccaggtggtgctgatgttgcctgcctgggaccacacttccaagaatcacaggggagtcctgtgagcatatcgaggtgtttaaatagacatggtctcttcttggtttcagaacaaaacctgggatttcagaactataaagtccagttcctccaaacactgagaaaaatatgtaaacgtatgtttgaaatcccaccctttgctttactaaatgcagtgactgctaaaggctttcattccgactcccattaaacaataagctctccaagtaccaactcccattaaacaataagctctccgagtacatcgaaaaaaggcttcactccagtggcatgaaatagaaaagagcactggccaagaattcagaacgtcagtctctggctggaggctaggtatgatagtaccacttgaatttcatttctttagcacctttctgagccttgggccccatcatctgtaaagcaagaggattctgagcagatgctgagtggtgcctgcctgaaacaccaaccattttcctgccttattttattgactatttcatctttcttcttccttacccctttaaacttctaataacccgaattcttttttgaaattaaaacaaaccaacaccaccacccccccaaaacaaaaacaaaaccaagctcatctgggaccaagtggctgaccactagagggcaaactttacaaactcaaatcaattacccgaagaggggttccatctgaaaacaagactgcagtgtgcactgatgaaaccgtttctcttgggatctaaaagggtctcccttcgtagagacaaacagtccaagcagattcttaatagatacaaatgacccaggcatcttcagcatggagcaaacttcagtaattttgaacggagctgataaaacagtgattctcctcaactcatctatagttttatcctagggttcctcatactatgccacagctgatctgaggcctgtcaatgtccctccttgaaatcagcactcagccatctgtcatctgcctggtgtttccatcgtacaagaccccacactgctaccactgaactcaattctttgagttgccatacccacagaacacctaagattcacttaagaggcacacaaaaactagtttctgggtgtctattccttcagattacaaccaggggttctaaggtagaccacccacaaatctccattttaataagcagcctccacatttccaatacagcgggtctggaagccatatattatgaaatgttattttacttaagtatagcctgcattcaactctaacttataaaaatgcagaataggtcttttatcttagtgttccaaatacctggaacaaagcctggtacaaaattactgctccagcaatgacacctgactgaatgctagatgaggtgaccagaaagacttcagaaggatctttgagattagtgggtccaggaagagaccaaggagggcaagagcatcaaatctctaggctatagcccaggaggaaataagaaccctgaccacaagtgtcttttcaaagacaacaacatctagaacatcccagcatccccatggtggggggtaaggagaaggaaggaagacaggcagagaggcttcagccaaagcttgaggtgaaaaggcaggcatgcttataaattagttatgtatgtgtgtatgtatacacacacacacaaacacacaatacttaagtttgtgtatgtacataaatctcaaaagaagaggtggagaatagatcattcaatagagcacttttttcaatatgagcaatgctctacacacacacacacacacacacacacacacctcatactgggaaaccaaattctgggctctgtatccatgtatttctaagtttatttgacctacttaaacttccatggccttacctataaaaatgaggatcaaaagagagctctgtgaaccttgatagaacagaataaatctatgacctaacactcagatcagccagttgaacacaaattcctcctgagcaaagccacagcagtacacagcatcctacgtaggaacttcagaacagctccttccttcagggcagcagaagtgtgggaggtttgacccagactgcactctgaaaggacctaggtcacccagcaacactctggagaccagcaaatgtacttagcatgtttatatgatgcttccgttatgtcaacagacgctgcagataaacagctggatgtgatcaaacaccaactgcctatcctctggatgagacacagaaaccaaagaagctggttaaacagccaacagcccttggcagtgcatgaacataatgtggcagatgctgggtggggatgatgcaggaaggccatagagccttggctacaaacaacttgcagtctggtcacgtggatatgcacacattatctgctgctgtcctatcaccgctgacagctgcagtacatacacacacaggaagacaaaggtgtgtggtatgatggctcttaaccttggaggctgctaggcccacttgggaattttaaaaaatcccaaagcccaggccacaccccccagcacaatgaaccagaactgtgaaggacaagaattgggtcttgagaattaaaaaaagaaaaaaaaatctaaccaagtttgatgtggtggtgcatatctgtaatgtcagtagtcaggaggcagaggcagtaaactgcaaattagaggccagcctgggctacggagtaagttccacacccgtgcttacacaggaagtccaagcctcaaaacaaaactatgcaggcaaaaagaagtttaggaccataaagcccaaaatgtaatgctgtttcttgctataaattagctgtgtggccataagatgccactataccttaaagtcctggggataagagacgtattcatacacttgagcaattagcaactggctagggacaaatgtttattaaatggtaatatattaattgtcactaaaatggcagtcttactgcactatagagcaatgtgcaggaaaaaataagaacacagatcttccctctagggattttcttggttatcacagatttgaggtataggagaggaaaggggggaaagaaaaaagaagtgatatgaagacagaccacaatggctttgtccttgctggtttctgtcttctgtatgcagctagctgtgtaggagagtgcaaagaatgaaccaagccagatgactgatacagctagtaatcttgggtgaagccactggatggatggatggatggatggatggatggatggatggatggatagatggatggatagctggctggctggacagatggctgggtaggtggatggatggatggatggatggctagatggatgaatgatggatggatggatggatgggtagatggatggatgggtggatggatggatggatgggtagatagatgggtgggtgggtggatggatggatggatggatgcacagatggatgatggatagatgaatacaaatgcatgaatgtaaaatgagctgatatgacctgagaaatgaccaattttgaagaggtaaattcatctggcagtaggaaggggacagaccaatcaggacacgaatgtgaagcagactgggtcaagatggctacggtatccctaagccgcctacttggtttcatgccccaagtgacaagccgcatcaggtaaacaacagctggaagcacagcaggaataaagcagagggaagctgagttaatgagatgatgacacagagcttgatgcagtggtccacacttgtaaccccagctattcgggaggctgaaacaggaggatcacaaagtcaaggtctccttggtccacaatatgagttccaggcaacgtagtgagagaaaggctgtgggtatgtctcagtggtttgtgaacttacccagcaggcatgaagttctgagttccattcccagtaccagaaagaaaaagtaaataagtaagaaaacaaacccaaaggaaatgacaagagcatccacctttctggacctactgtgagccttacatgagaaaggtacatgccagccatgggaattcccgtgccgagttacatgctccatacagatcttctaatctgatcatgtccaaggacagcttctctcatcagctgagctgctgtgttcaaaatagatagtaagagagaggtgactttgacaagaacactgagatgccaaactcgtggccccataagatgtgtctgagtgtgcacatgtgtgggcacatatatttatgaatgtattatagatttgtctgagtgagataaaactattttgcttttatttttctacctgctacaaggtaaaggaaaggtcaaagctcactcaagtgcctattcagaacttcatgaaaaaaattaataaaagccaggcctagtagcacaggcctgttatatcccagctatctggggctctgaggcaggaggattacagtacaaagccagcttcagcaactcaacaactcatctcaccaaaatatgtgggtggggagacaggtagggatataggtcaagggtagagtgtttttctaacatgtagaagccccaggttcaatccccagtactgcaaaaaagaaagagagagaggagaaaggaatatggagacacagggaaaaataaaaataaataaacctaaaattttatagagcatcaatgaaaggatcatatcttctggaaactgtgagactagacacaagtagatgaccagtaacagacaagttattctaggtaagacaaagaacgcttcgtgggaaagacagtcactcagttaaccctaaccaaatgaattgacggggacctggtttttattatctgtggaatgtgtggttggggaaaaagttctctgaaaaactcttttccatgtttctgagaggaacacagatccaattgatccagcaccagagactcttatcagagaggctgaactcaaacacttcctgcctgtgtgaccatgaacctcacttggcccctttctttgttctctcttaacctcagtttcttagacatcaaatggagttggggccaacaagaaggtttagcaagaacagtacctgccaccaagcctggcaccccaatctcagtccatgagacacacgtgggatgacttccacaagctgtcctgtcccttcacacccagcccacctcacacacatacaaaataaagtgtaataatgtttttaaaagaatatggaaatagtaacattcataagttgatgtagaatgcaatgattaagagtatgaacaagagactggagctaggaagatggctcactcaataaaacacctactgggcaagcgcaaggaactgagtattcacccccaacatcaaggtcaaaagtcatgaaccatccatgccctcagtgctggggagatggacaaaggctcaaggcttgctggccagttggtgtatccaaatcagtgagctccttgttcagtgagagatcctaaattcaatactgatgtctgccctctaaaacgagtacacacaatacacacacacagacacatacacacacacacacacacacacacacaccactcactcactgaagacccagagctggttagttgggagtgtttacatgagaaggtgtggtcccagttagaatgtgaacatcagggaagccagaaagctgtagtcaacaaagggccaaaggagttctctcattgctggacgaaagtatctgatctgcggagcccagcttcctgattggccggagaggcagccagccgcctgccatgtccctggagctttgggcacagtgaagcagggcaaaggggaggagagagggaaaacaaaataaaaggctggtgtctaaaaagagcaaacagatgagatgcatctgtgggctgggacagagtgagacacaatcctgggtttcttgctattcatctgggtcaagtcactacagccaagctaaggaaacagcacaggcagatagaagttagagagaagcctaactctggggggggggggggggggggtcttcctggtcatggaagcgttcgctctcccacctgcctgctggaacccaggagcagaggaggaggaagaggaggaggaaggaggagggcgagggaaacaacagaggaaggcagaggaggaaaaccctggcagcagccactggggttactctcggtcagtgccctctctaagccccagcttaagtttcaagttctctgcagtcttgtgctctatacaaaaggaaccacagccatcaacagcttgagacgtgggtggaggagagaaatggggaaaaggagaagcagagaaagaagccttgccagcagccccagcctgcatacccttcttaaatggaccccctaggcagcagcagggtggagtagaggtggggttgaggtctcctagccctggctggtcaaatgagcaaagacttgggggtggggggctggatgacagtcttgtggttctatttagcctatttgattagtcttataaacaagactttggaatattttcagctacaaaggggctggaaataatcacacctgtttattagttggttggttacttagttcctttctgagtctcacggcttccaattcctcattctcctacttccacctccacaagctgccattataaacacaccatcatgcccaacttcgggtatctgttgctttggttcattttgtggtgctgggcctgtgagatgtctccagaagactttgtggggtgctctggagagaaggaatagtagctgggtggatatgccctggggaacctgtgagcgtggacgagggtgagccagactgtgggcacacatgccttgagacctccatggtggtcacggggccccggagaattttcttgccctgcagtgaaggctttctcaacagcacagaagaagtgctaattggagtctaatgaacctgggtcacatttccattacagaatgttctacttctgtggacattggaagtcacttttcaggccctccaagtttctgggttccgaaagcactaataacaccaagcatggcttacagtgcacaagaaaatataaactggagactaaatatagtcaaaatacatgctgataaaatcgtcatggcaattagatgaccagttcccaagagacctgactattcgtggctatacaccctgaaccgtttgctgccaaaacctcgtctttagaccaacagaaattgtacaactttagacactgtatgctgtttaaattatttggtgcatcagttaaatgtctactgtatcacagtaccagtgctaaggataaaaggggaaaaaacctagttagtgcttcccaaaggcagggacaaaaggggtatcgtatgacataatcccggcccttgctatccaagagattgtgggcatccagtaagaacagagcagccctgtgtgctattgagaatcagtcacaattgagatgacagcaggaaggaaacacctttccccagatccatgctctaaggcagccactggctgacaggagaagaatgctgggaaactggaggcctcccaggaaatcagtcatcagagagagtcctctcagacgagcttacgatttttatgaaagcgctttttaaaaagattgaagagacacacacacacacatatacatagatgaaagcaaacactcataaaacaatataaatcttctttttaaagaccttgaggggtgggctcattcttctgtctcttctaccaagttaagagtcaaaagagccctccaggagacggtagcccacaacagaacttggacgtctgggattcttagaaaccatttctatcaggtaaaattactgagccttgggtattttcttatggaagctagaatggattaaacaaataagcatgccttcctaacaagagggaagctgctagaaccctctgggatgagagcttgagtcatctagcaagagtctgggtggtaaggaggagccattgagggctgtggctctcactggccagcaggtggggcctgagacagcaggttggctgagatagctggaggaaaatgagagggaatactgaggtgctaacactggtccaaatgagttctgaacctaaggagaaacaaaactcaggaagcccatatgaggaaaaaacaagaagacagctggtaaacaaacaaaccccccatactttgtagagagccttttgtgaacacctgagcgatgcaaagcaaaggggatacttggaagatggaaggagaaaagcaggaaagggcaacaataggaagaaactaattagaaacaggaaaaactgaatccaagagaaggtggcagagacaggaggcatgggagatgggagagtttaagccacccggttctaagctatgactttgtctctaactgattgagaccagacacaacaggatgaaggattacaaccagttcctgggaacttggaaaacccacggaacaggggttggtgaggcagctcaggggatatggggggggggggggaacacaggattccctagagcatgcttggtagctaaattagctaaacaggtgagtagagccctgacatcaacttctggcctcctgagagaaagacagagacagagactgggtcacagagacagagacacagagagagagagacacagagagaaagagtcagagacacaaagacaaacagacagagagagaaaggcagggacagacaaacagggaacaagagaaggaaaggaagatgaccgtgcaagtgagggacttaggtgggactctttgcaggcagttaggggagacctctcggtatgcatcctgcacacattgcctcatttcttctaatgtctaagattaataaacgtagcaggacgtggtggcactttgaggcaggaaacacgactcatatttgcaaagcctcaggcacattacacagatcaatttccaggatctctaaaaccagcttccaagaaaggtattgctattattctcatttttccaacccaggaaagatgtcagaagggagtatctggctcaaggtcacaaaacaaaccaaaggcaaatgtcaacccagcaactttgatttcaaaactctagttctttccactctgttagcaactaagtgaattgtgttactctccagaatcaaaagctggtgatgtcaaccatgcttccccacaatgaagtgaggcaacgtgggcatatggtgtggtggagagatgtggaactttgagccacacagacctgaacctaagttacaactccatagcactgagcaacagatacaaccttttcagactcagttttctcatcaataaaatggggatagtactgatccactaatgctgcttcaaagaaccaaattcagtagtccactaaaaatataaagttccactcaaacacaggcacatcaatgctcactgaagctctgttcgtaacagctaagttagagaaccaatctagggggtccaaccacagagaaagaggagaaatacttttcagccatagagaacaaagctatggcttttttgagataatacatatagtcagagataatcctattaatcaaattaagttagtctcagaaagagagatactctatgcttttctctcacttatgggtcctaggtttcatataaatacatagaacagaaaatagaagcaaattgtctaggaacacagaaggaataatgccaaaggagggttgagcagaggagaggagagggtatgtgaggagcatctttaacatgtagaataaacctatgtaagtatggccttacatgacatgggaccaaacatacaatgcatacatacctatgtttagtatgtcctttatggcataggacaatacaatgcacacctatgaatgtacccttacataacataggaccaaacatacaatacctatttatgtgaatacacccttatatgacacgggaccaaacatacagagcatacctatgtgagcaaatccttatatgacatgaaacgatgtacaatgaatttatactattgggggatatcttttaatgcaaaatggcgttgctaccctgtccaaccttgtctgtagacagagtcaattgaacactgtcttttgggacttccgtgcaactgaggtgggcgggcttgaagcacaaagctttcagggagaaccaaactctatgcccaagctgctctctgccacccacagggtaaacgaatctcatacaggaaaggcaggagacatgtgacactgttgtctggtggtcacaagtcaagctttttaaaaagcagcctgatattgtgagctaacatggctttctgtaattgaatgcaattgtattttctatgcttgtctgggtaaagttgacctttggtttgatttagctcaagcaatatttcaacagtgcactggggcactgctttggctagagccaggcctctgccctggatggcaaccaacagcccaggctctggggcacagccgggctttgacaggtctggggaaatgttcagggagatgaaaggtttcaaactataaaactctaaaatctcaagtcaaaacttttgacaagcacacacaggacatgaattacaatcacccgaagatttttacaggcttctcaattttaatgacatgctgacacgcgtcatcagatctcacaacaagatgacacatgggtgtcaggtatgaggacagaagactagagttcggggctgtaaacccaacttgagcaactgctctgatgaaacaaagggcagaatttcaggcaaaagggagaagtagctgtgagtcacgagatggtctttagagctaggcctccgggaaaagtcccctagtgtctgctacgcaggaagcttggacgcgtagcctaaaagggaaggaaagctgacagaagctctctcatcctcctcaccccagcctgtctgtgtgtggggacctcgtaggtgtcaagggcagctctccctaggatgtaacagcgacaaagtatgaaagactgaaattctactcttgccagccgttgccaatggtggtttctcaggcaaggtacttagcctctctgaatttcatgtgcacaaagagaaatggccttcctcccgtaactgcaaacacagtgaaggaaggaagagatctcacacttcctgtgtatcaggttggtatgggaaggccttgttcctattggctcatttccttgaggagtcccatccctggggaggtgctagcattgtcacctcttgaggaaagtgaggcacaggaatgttacatggttaggcatgggtataactgaccaactacagaagccaggcttgaacccagccatcctgactctcacgttcaggggatatttaaaagttattcactgttcatcaacacctgttctccaacccctgcctcagccaagttccttgccttatcaccacaaccaccctggctcctggagtttatgtcttatcaggacttgtcagtatcaacagacaggcaaaatggcacggccattttccctaactgaaaacccttggcttgcagatggaaaggcacagataacctgggtccaagccacaatggaaaggccaagccagccacgccattgcctcaacacaacacctagctaaagagacagagacaagcagacataactcagcatacacaacactgccctggatctcctcccctctcaacctcaacaacctagacacataatccagtccagagcccaagattcaccctggttctttctcggaaaagttttcagagctagagggcatctgcaccctggagagaaaacatctgaaaagcccctgaaccagagatggggcaggggtaggggttatcaactgtccatagtctgtactaatggaagcagaagagaacataggctgcaacagaaaaccatgtggggtggacagtgcccgacttgaaagagcacagctctcatggagggtgtcacttccatgggctgtggagcacaggcacacacaggtacagcccatccctcaaccgccccagcaacctttcctgacccaaacacaaaggaccagaaaaatagtcgtctgcagtccctaaagtaccttctgggcttcaggacttaaagtgtatcaatgtggctgtcacttgggacagagccagacacccagagagctaagaactaagaactaggagctaggatcttggctgagtcccatgcacacaagagatcagctatctggcatccagccacaccacagaaccgatagccctagccacagcactcgggtcatgccacagctgtaaagaatgcagaacttctacaggacccacacaaaccggagggattgtccctagattaagtaagcctctgggggactcactaactagacaagggtttagctgactgttaagatgggggtgggggtggggaagaggaggaaaggaggggggaagtggagggggagaggaagagaatgtcttagactgtgaggatgttctaccctagaaaagccagaatcctcagacacagcttaaagaaacacgtcccgacttcacgccagtaggaagccctggggacacagtaacttgcatccatggaggatgggacagaagcagacactaggagaaggcagatccctgagcagacaggctcacaagaagcagccatgagcatgttcgctgactatcattaaccagcagtgagggtacagccaacagcaaaagaccagtcaccatgtcctctgactgtggggacaagccactgggaaggactgctttgaggctcctcctctccccacccctggggaaaaggccagagtcaccaagacctgggcccagagaagcagatgtggtaagccgaaggacagggacaaagaggaggctgtgggggaatggtcctccctgatggccgggggcatcctccccagccctagtgcctggaattcaggcagtgcctgctgtcttcaaaaacaactatttaaaaaagaacctaaccttttcaggttttaaaaatacatatatgtgggtaaacacacagctaatccccactgtgggcggggggaaaacctcaaagagggccatgagagtgaatatggacctttgcagtacttgttattcctctgaactcagattagcatatccagcggaattgtgggaggtagattttgtgaaagaaactcaagactgatttagtggggcctgttttacacgagggaagcggttctgcacttacctatgcttgctctgatgctgtccagagctttcgcttgacaatattacatgaggcgaaagggcagctactagacttgctttcactgcgcattctctaaagatgctctcagggttaccatgctgctaccacgcggctgctcagagtacaaccaccgtcaccgtcacttcatgccctgaacaggctatggcctggtgggtaacacaaaccactgtctcacaggtgtccccacccaaggaccaagccaaactctaagatgaagcatcatcaagtcgtttaaccggatctcaaaagtcaagacaatgaaacttgcagcccagacaacatgaacaaattgtcaaaggccaaacaccctggaacgtgaggagagcaatgcatttttgacttatatatgtgtcacccatgtgctcatgctcactgctggaaacccgtaggtgtagcacctcactgaatgcttaatgatccacaaatgtagttcatgtccaaatttctaacaagcaagagggccaggaagaatcaagagttcaccaaaggtgagagcaagaacctaaatttgttgccaaatcagtcttgacgcagcttcaagtctcccctacaccagcatttgccaaccttcctcaggcactgaccaactactctccagcatttcaccacagccacatgaaacaataccttcatgaacttcatcttcccaacatccatttaagcaatcaggcacattttcatgtgagtcagaatcaaaggttgtcgtttgtgtcctgtcagaaatcagtttacatgtcacagggtcacagtctagacatgtcaccttttctgcagtttctgagaatgtagctgacgtttatactgcctttgagcatgggtgcatggtaggaaagagggaatgctttcacacactaactccccaaactgacttagccaccactcaacctattggtaatactctggcttagagagaaaaatgaaaaccaataaagtgaccccaaagttccagtgacatgaaaactgggggaggcgcatctgtaaggcttcacccctgcttctcccctcaggatgcttcagtgatagaggagcaatccatgacttcatttttgaagctggactattattgaaacagtagaagatggatctttctagaaacatgaatcaggaagccagggttggagggaagtcacctccactttcagtatcaggttccctctaagaagaacccctcaccctgagtctcagcacctgggagagcagggttggcacaagactgaataactcaagaagccagtgcatgaatccacacagagattaaacagtttctgaccaaagcaatgtcgtagcccaggaaaccttgaggcaagacaagagtgcttgagtagactcctgtgcctacagagttcctgtggccagtccaatggcattagcagaggcaaagaacaagatgagtctccaaatagatctcatagcaggacccagtggctccagccatgaccacagaggcaagtagctttctaagatcctgagcagtcccatccaaaggagtaggtagccagtaccaatctcaaactttgttctcatgctgatcaatatctgggatagcaagagagtcactgaacccctacgtgacagagagcagagtgtagtagctgaagaatcatagtaaaatcagaatctcgagcggctaaggggatagacgggatttaatgatatgaattagaagagataggtaaagtctgcttagctcaaaaagccagcggtacagttagagaaaggagaagtcacctgcagttctgcatattcacgagacctgcagtttgagttggttgtacaatgggccatgagtgaactggatgacaagaccttgaaaagcctcttgcaatctcagacgtgtggacagaaatacagcacgcagacaggcagaagtccccttctcctgtctgctagaatacttttgtaatttctggtaaacttctggaatgacataaacacaccgagaggcagaagttgggaggaaaagcattgcgcaagaggagtagatgacaaacagaccggaaaaaaataagactccagaaacaggcacaaaaattgatcctggatttttgacggacacggaatcagactaattctctacaagacggtggcaaatactacctgacagcttgagctctcaacacccaacatgagctacctcatgagaggatgaggtacagggatcgaccatgacaccgccagcctccaagtcagactggtggggtgtttttcaaaatcagcaaaaagttcccacttcctagagaaggaggcagcattttttttcatgcttcctctacaactgtggcctggctttctgttgtaagataaacaaagaaaaataacagaaagtcaaagaccagctgggcctggagatgtagttcagtggctaagtacttgagtagcttggacaagttcctgggcttgatgctcagcacagaaaagcaagttgaaacagaacagaactagctgcaagggtgaaggaggcactgggagagagctcccctcagcagggctgggcacaccctgccctttctttcctccatcccacttcaggactccagttgctcggacaataaaagcaccctgctctctagggcagcctccactaagaactggaaattccgccaggtccattttgccagccccacaaatgaagaagcagaagaacaaggtcagatggtcagacatgaaacaatgaagacagcactggcttctgttaacaaagcatctactatgggccaaccctgtgtcagactttgtaccttaggaattatcatattaatgatgtaataatatctcattatactgtgcataataatataatactattataattaattcaggaaattaggtctcagaaacattgaatgttttgtctgagatgtccagacttgaaaataatcctatcttggctatggacagcactggatgcttttacagagagcccagattctatttctaacacttccatggaagctcccactacctggaacgccagttgcagggattctcatgccctcttctggtctcatgcacgccaggaacacacacagtgtacacataaacatgcaggcgaaatattcatacccataaaacaaaactgatagatcaaaaaagaatcttttagaaaaataatcatggctcatattcattaaatgttacttacgtgtcaaatactggtttgactctgggtgggtctgttactgtacccattttcaataacaagagataacctctaagggacctggtaacttattcacaaagtcacgtggtaccaccggcactttttgtctgtgctacccagtttcctggtggtagaagaaataactcagttctgctgcatggcaacctaacagaggctctccatcacagaaatgcctggccttgaccagagtcctccagggaagggaaacagcagcaaacgatctcagtacacagccaggtacagtgcagcttcgagctccttacaggggactcaggaaccagagtacgccacacctctgcactgaagtcacacctcatcagtcagagtccaccatgacagtgcctcttattaagaagtgtgtgtgtgtgtgtgtgtgtgtgtgtgtgtgtgtgtgtgtgtgtgtgcgcgcgcgcgcgcgcatgtaagtgcagtgcccttggaggccagaagaggccagcagactccccggagttggcatttcaggcagttgtaagccacccgaggtgggtgctgggaactttacaccactgctcccctcacgaactaggagggaggcctttctgcaaaggctagaccagtctactctctcttcaaatgtcaaactgggtaaaaagactttcctggagcagtgatcactgttggcccatcacgagaggagtacttcctcactggtgcagtttagacagcagcactttccggaggcttgtggatcacttcttgatcatcactatggataccaccgttctcgcctgttccagtgaacatcaaacactgcctcttcccccacccgcgctggcaggcttactgcccaggggactgtcacaatctctgtagccaaagtctcggtcagcaaattgtatgttccccagacacttcctcagtggcatgccaggaactaactgcctagctacttagcaaatctgaggtaaagatttcactgtttcaagatcagaattcaaatgccttgtctggcttatccaaatggctagttctgagggcgaagaatgagtttcctattagaaataagtgcctaacttttacttacccatgatcaaattagaactctaactgctctcataggcacagaaatatctataatctgtctatccatggaaatcctatgggtagctcaaaaatgcccttggcaacaatttctgctccagctggccttaatggcaaagcaagcctgtgccattcctgctggggtctgcatccccagtcgctgtctggggcaaccagcttctctagctttgttcccaatgcttcccacagagaagaccaatcatccagccactgaagaaaagccacagtcagggacaagctagagagcgagccctgggacacacgggcagggaaatgttcactcccggatgcatgagtggaagggctttgcttacttgagttgggatgcttgatctgccgtaacattctcaggaccttgtgcatgtccttaatgctggtatctctttggctgtacagaagaagcctctgagcgtctgagaacaggcgagacacgctgcaaagggaataagaagaagtagaaatggcttgggttaggccagctgtctctccccagcctggcctcccctactccctagctattactccatcctccagggggagctcacaagtagatgcacaaacgagtaagagcgtgcgtgtgtgtgtgtgtgtgtgtgtgtgtgtgtgtgtgtgtgtgtgtgtatgtgtgtgcgctactggccataataagcccaatgcctttatcccaagacatgcttagcgattcataatacattttcatttattaaaaggatgcattaggaacacatataacaggaatgcatatccagtaatgaattttcaattgatcgtatgcatttgtataccaacagtctgacatgtttttaacattttggttatgcaatgtggccctgcttgtcccaaccgcagcaccatctccaaccagcagcacatcctacagtccctggtctgctctaactctgtgactttgcacatctgggggatcctcaacatctcgtctggaaggagcattttatatccagcatcccagcatctgagccaggaacacagacactaaggaagcaccatcatgctctcgggcagctcccactcagggacagaaagacaagtcaacagcagagacactgcagtcatttcaggggtcagagcaatgacctgagagcagaggacaggacactcctgccttgggctctgagctgctggagaacccagacccttcctgcgcagtggctctggctcctagaagtgtccacttcaaagggacagcagagatctgagtgagtagatcagatggagcttgctcagtctcccagagcactgactgagtagacagctttcgatcccataatcacagtgactcctaaatcccacggtcttaaatcctggtggcaattcccccttcattcattctgcagacttctcatgcaaacctctccaagaaggaaaggataagtattaactggcaagtttgggaaagaaaacccgatctggtacttacatggacttgttaaagtttccaacaacaccgggagcctcgccgggagttggataacggaagcaggggttgttggcattacagataatcccctgtacccaggggagggttcctgcagacggcatggctttattcggaaagtggcctattgaaatcgagaaggaaacgcagagaagacattagacctgtgaagtgattttaacacaagcctctcacatctgtctgtctcattcaccatgtcccagacttatcaatgttatttatgtgagtgttctgcttgatgcacatatgtgcaccatgtgcatgcctgcctagtatccatggaggccaaaagaggtctgtaaactccgctgaaactgaagttacagatgttgtgagccactctgtggatgctgggaactgaactcaggtcctccggaagagcatgcagccagagtgctcttaagtgctgagccatctctccagcccctccccatgtcctagaagacaggtgggaatttgacatcaagtaaaggtgaccatggttctatttggcatcatctgtagattgggattcatgataccaacctcgggaatgtaataaatggggtctatcagaccatggacaccaaccacttggcaagcagcaagtcgccatttgctcaatccctaccatgagcctcatctccaagagacacagaaggacctggacagtgacctaatatagctccttcatactgccgctgatgaagaactcagagatgcacatggctggggatagaaacttcatctccaggatcccagcccatgcctctcccttccagcggtagccttcaccatcacctcactcttctcaagactccacctgtacctgccttcatccagcaaaagtttgtcagcttcacttcctccaacagcccaagggtccactaacagcacctcaaaagcatgctcacatgagacagaagccaactgccaagctatcttggttttcctgtcccttcctcactcatcgataaaatgaggccacatccaccaggcaactcctcacccttttccctacatctagtcgtttcttacaaacaataaccggtatgtctggctgaggtcagagcctttaaaagcacgggtaggtttgtagcaaggatttacaaatattgcttatgggaatcaagataaatgttattccaagggcctgttcgtgttgaggcaaaaaggtattggctctggctctcgtcatatgctcagggctatctgaagatctggcgagcatgaagaaccatggctccaggcaatgacttgcttgtatcttcgcagagtttggagacaaaccgatggagatttacagctctgtccctgccatgtgcatagcacagccaagccaacctccaagtcgatctccagcgccttgttttcccacctgtaaaatgctgattgctgtgcaagaggtgtcacaggaactcttatcagtagagcagcttgtgattctatttgtatttttatgagacaaagtttcactctgtagcccaggctggcttagaaggccgagcacttttacagagggcccagcacaaggtaaatgctcatgaattgtccaattagaacttctaaggcatcatgtagtgcagcattgtgtagtgtgccattgtgtagtgtgccattgtgtagtgtggtattgtgtagtgtgccattgtgtagtgtgccactgtgaagtgtgccattgtgtagtgtgccattgtgaagtgtgccattgtgtagtgtggtattgtgtagtgcactattgtacagtgtgccattgtgtagtgtagtattgtgtagtgcattattgtgcactgtggtgtagtgcactactgtgtattgtggtattgtgtagtgcgctactgtgtagtgtggcattgtgtagtgcactattgtatagcatgttattgtataatgcactattgtgtagtgtggtattgtgtaggtcactactgtgtaatgtggtattgtatagtgcactgttgtgtagtgtggaattgtgtagtacacgattgtgtagtgtggtattgtatagtgcactactgtgtagtgtggtattgtgtaggtcactactgtgtagtgtggtattgtgtaggtcactactgtgaagtgtggtattgtttagtgcactgttgtgtaatgtgctacccctgtccatagggaactgaatgctctctttccatctcacaactcccaccttcctccaaagacagtttctcttcattttttttcaagtaaatatgctaatagacactccccaaaactaacccaaaggctgagatgcacctcacattatatatcagtacggggaacctttcactcttttaaaacttctatccctattccaaccagaggccacatggaagggtgtgacaagatctggtccccatgggcagtccctgtagggactctggcctgttgaattgtttactcagctaatctctttatctccctgttaacagttcaaggaaaaccaaacaaagccccttgcctaacgagctgctgctcctccatcagtgaagagttagcaggattctcctcttacaacttgtagagatagtagccctaagaacgggagagtgtaggtcaaaggcaaagacggtgaagacatttcaacctttccttcccctgggcaaacaaagacccttccttggacgctgcagcccatcctctgggcaaatagaaacaccatggtggacagttagacactgggtgtccaggaccccagtcaaataatgcaatggacatcaaaaagtcagaggactcatgaggaccttgaggactctgacctgaactacaaagatttacagagaagaatttcatactagtcctttgttcccagcgtagaggcatacatatatctgcaggcttcaccttagctttctgctccgctgttctgacgaaatcagaaagccatgtccaagggaatgtatctgaggcatctgggtgtgtgacctgaatatataggatgcctattagcaaactggtatgtcaatgcctgccgttacatgctatgtaagaaaggggaaggtgaccaaaaaacgcaatcaaaaggtgactgtggcctcagggctgtcttgaaagaacacaatcttctaagtcaaggggcctgttggagctggtgagtggtaagacaagtgtgtgggacagaaagctttggtcccaacaaaaactcctacacaaatgctaattctttgggcctttctaaactgttgctccagccatccaccgagcacagccagaccgtaaaatggtcattccgacagcaacagtgcaaattaggttttgctgctctcttttatagagaagctaaaatcacttgctcatggtgacacactatgtgtcagtttctagccactactgtatctcagcgctcactgtcaagactgccttcaaatcacatgagtgagcgagacaagcagcctgaactgtattccacctctactagaaatgtaaatttgggcaagtcattataggtgtgtgagccccaatttagctaccaggaaatcagagcaaaggatagcaaagtctactatacaagattgttgagaacaaaatgaaatgttacaggagtcaaactgagatgttgtacacaaaggctgcatatgctctaaaagctgagaaggtagctcagtggttaagcccacaaagtactcttgcagaggacctgaggtgggttcccagaactcatatcagatagctcacaattacctgtaactccatctccaggggttctaacacctctggtcttctcaggcacctactcatgtgcatatacccccacacagacatatatgcatacttgatttagaaagtatgggttccaatacatggtccatgatttttaaccatgagattaaaagacaatgcaagcaaaaggacaacaccagggaactggacactggcatttgaaacactactgtagggtgatttgtagccgtcactttctgactctaaggctattttattatcatgattaaaaaaccgttaagattattatcattactatcatcattatttaactgggactacaaatatctcaagttcatgccctaaccaaaaaaatagtaaaggccagattttctgttcaagctatttgtggcattctcctgaagacagcaactttgtaaagattcagttgagagcatcttcactctggattttgctagccatcactgagactcaggcgtggtccacagatactcacactcatgttgttcgtagggtgggtagctcaggcgtacagagatcaggatcaggaagataaagagaggccaggccacttccagtaacagctgacactgaacagaaaataaaacacaagatcgtgaattttaaatgataacatggtagccagctactactggactgagaaacccacagagcaattcagcaattgactgacttctggcacttctgactcccttcactctccaaacttgaagtgcattgaattgtgggtggtatcctgtaacatcccattccacacctgtgtctttaaggctcccttctacccaggtttcaagactcagccatgcttctttctgcctgagctaggaagtcctcctgtgctcacattcccacaaacctaaacagttcctctctcacatctcccccaagcccgagatgatctgcttcagtcactggctcccacatagcactcttaattaacatctatctcaacagggacacatttcattgtagagtacagtcttattaattgcgatctgtcatggtctcttggtattcccccttctatgacgagatcagaagtaaactctctctgggtaactggtactttagagtattaggggcatttgggctttttgttttgttttgttttgttttttgtttgtttttttaaccatgtttgtttttcctagtttaaataaggaactttgaattttctaagaactttggtatgactttacatcaagctcattttgggatcttcagggaggaactgaaacaagatagtagctatgcatgttccagaacaaaaacatgaagtttttatacttccttcggttcgtgaacccctactaccacaaactataaagagtagtttatacaaagagcacattaaaagagaaaatggcaaggaccagggaagaaaagacgaatcttactaaagatgtctgtaaataatcccaaagaaggaacaaaacctctacgtttgcaaacaacactcagcctcttctcttttccttcatagaaaatagatttactactcctttgggagagggtgatgggcacggattgcaaaccatgacaccatacaatttttattgtcccttacacctctgtaaactgctcaggggcaggagtcggggatgactttctaccagagaacacagcctggatttcctgaacactgaaaataacttctctaccagtaaggctggagcccttcctctgagatccaggtatgctgtgcctttatcagcctgtggcacaagagctgtgtttacatatgaggctctcccttctgttactgtgttctcagcaaatccgcaacatggttaagggctaagcatgacacggtaagcatatattgggtaagagagtgaactgaagctttcaaaatcagaaagacagaaacaaaaatcggctgacccctctgggaaagaagtttggcaatatgcattcaaaaggcacatttacccctttgaacaactgtcatcctcctgagaattcatccgaaggagcaaactaaataagaaaacaactcaatccccaaaagccgtatacatgatttgaagtgctataactgtaaagtgttgtaaacaaataactcaatcacacaacaaaggaaaaatggttacataagcatacatctaatgggcaataatagattacttggttattacagcaacatttatgaaacccagctttcactatccaagaacacaggacacagaacccaatacattctaagcctgcatctttataaaaccactcgcacacattgctaagcaaacatagaaataaagctttctataatgacatggctgtgatgaattacagaataatgaagcctgaaaagtataaaactgaacagagaatatacaggaagtcattcatcttgacactccgaagccactatttcaactaacaggataaatcggagctaccatttagggagagctccatatgtactgggctcattttacacagttgacttccattaatcctcagaacatcattgtgggcatggaaccattattcttcccattttatactgaaaagtctactgcttaaggaacggccagccacagcactagtcagagcagagccaagaccggcagccagctgtacttgattccagaggtcacatgaaattctatttgacaaagacaagcatctccggtaggaaacaaataaaatctccctacgcagcatggactaaaaatgtctacaggttccacagacacaagataaactaacaccctgcagacaggtagccgttatagcgaatactgaacatctatagacacttagtgatttgtgtgcctcttgttcccaacagttcgctcacaaaggctgcaatagtactatttttataaatgatgattggaggaccagaaaaattatgagccattggaaccccaatcttaatgtctaaatctgtgcagtacccaccaggctgcctctcacagtgctatgctagagacacatgccttctacctcatcacatatccgacccagtaaagcaagccttgtgttcaggacacctctgtagccccacacttagcaccacaaagcagcatgtggtcagaataggttcatccactgaaagaacagtcggatggtacccacagctctggcagcaaagcaccagaagaaaccttagaccactcaggaggtgaaggcagaatttgtaaccagatcaggaaaagagatatgaagtaaaccaacagtgacagtcatgatagtcaactcacaccacaacacacacacacacacacacacacacttcatagatgttttttatagtcagacatccaaattaggatcattactgtaatactcactttacatacgaggaaactggggctgattaataaattgcccaaggaactggtatgtgaaagagtttagattcaaagccaatctagcttaagggatgcttctcttcggcactaaggtcaccaatttcctttagcccctttctctcaccacgtagaccgtgtagactcctgacctttcaaagcttctactgagctgagcactaatatgtatgtatgtatgtatgtatgtacgaagactctgcacacaatattcacaccaccaaaatcacagagctcatgggagattcgatttaattatgcttctttaccctgtgcctccaaaactatttttgtctctaaacatcaaacccactcccaagctcagaacgttctaggtattgccacatcccctccttctagaaactaaacttgacttctccaggcacactatttcagatccactcatcaaagtcagacttctcctcgtctctaacctcaccatttttcctaagcataaggcatgaataaacagcctagggacaaagatgttgcttgtactgttagaagctcctactgaaaactcttgaaagtccttcatagctacaccaactctgtatcttctcaccatatagtggcaatggtagaaaatgttgttttcaagaagtgattgttatcaaagtcatggctgctctagggaacaccagagcacattgtgcatccccttctcctaactcttcacctctaacctgaggattcggaacaagcactcccgcaggaggacttctcagctagacaacattggccctggcagatagctagttgttcgggattctactacaaactatgttgggtttagcagcaacacccctgccctctacctctaagtcccaggatggggaaggggccgtgccctcagttgtgagctgccgctgtaaatttctaaggaacaaatgctgcttcctgtaaacgatgcagcataaaaccaagctcagcagctctgccgtcaccagggttgagagtcttaagcaccaaaccatttttgcgttttcattcagggtggtgctgagccgcacacactccccatgtccccatggatagtcacatttaacttttgctcctggttgcagaagctaatacaccataccccagtcactgcacgagtgcacttcgcttccttgcctatagacagcagcggtgatcttaccttcaagatttatccttattatttcaaggttggcgtggttcaagggctgtgtttaaagaacactgaaagatcaatggaataaaatttggccccgggaaaagatcttctgaataacagtagtcaaaaaaaaaaaaaaaaaaaaaaaaaaaaaaaaaaaaaaaaaaaaaaaaaaaaaccaaaaaacaaaaaacaacaacaacaaaaaaaccaaagcaagcaaaaaatattgaaggtttgaaagacaaaatgattgcttcttacactgagctagagatgctggagtttgatcaagcagagacaaataatcagagagaacagacaccaaggaaaaggggagggaaacatgctttctgtctgcagcatggtcgctaatctaagaaacacagtagaaccagttccccagacatcagactgctctgatgaacactgttcaccaaaggaagacttgtgtgctccggtaataccaggtaactaactctatggttactacccactgttaacttgactgaattaaggaaaatggaggagctgggtggtagtagcatataccagcacttgggaggcaggggcaggtgaatctctacgagtttaaaaccttatcttgaaacccccaccaaaaaaggaggagattaacaaggcacacttttaagtgtatctgagaggatatttctaaaagttttaactgagcaaggaagagatcaactctaaacgtgggcatcatcacccccagggactgggattccaaactgaaaaaaaaagggggaaagacattcatcccctgcagctccctggtgcagatattatgtgaccagccatctcgagctcccactctgatactgtcctcactgtgccaggctgtcccttcaaacttcgagtcaaaataagccactccttctgtaagcagcttcttgtcaggtgtttgaggaattactcagcaatgagaaaagttatacagcaaccaacacttgtcaaatcccccaatggaagactccaaaatatttccctatatggacaaagttttataaatgtcccaaaaataagtaggaaaggaattactgtcttacaaagtgtacagacacggagtggtgtgatatgaagatacagattcgacttgacctgtccccaatgacacaggcttcatcatgtgtgcaaaacccaaagtgaaatcttaaaactaaatcagtccaaagccggagggaaggacaacttataaaccaggcctatctcccagtaccctacagcccgatgcaaaaccattcagaaccctcagaatgactgtgaaaactggtactatcttttgaaaggacatctggtcacacacttcaagggtcatgtcactttgacccagtatacctgctcctgagctcctgggctaaggagccaacacaacaaagtaagaaatggctgtatgcataaaaccctcagaagatttcattcgaaacagcaaacactaggtgcaaactaagtgttgccaatagggtttgagcttacagacctgcactgtcagcctcacatacagctctctaggatgctactgacatcactccacaatagactgacaaccagaagaccccacatctctcttactaacttaccaataatgtgttcttcgttgacgaaacagattgcacagaattactgtgaaaatgaaatggtagatataaaagtacctttgaagtactcaagtgcagcctcacatcggaactcctcactagaaagattattcacaaatatgagaacattcaaggcaagcaatgctaaggagcgcagtgcattaggtggggtgagtgtatgtacagaatgacaaacgcttcctggcttcctggcgttcccaccactccactatcaagacccagaggatgagcggttttagccatgctgtgcctacccaaagggctcctttcagatataaaattaaactcaactgtccttaactggatggtctatccttccaactcatcttcagccacactcttcattcagtgagccaacacacctggcttctttctgttctctcagcccaaaatacagtgcctctgaggtctgtgcccctgatcttagcatgctaacaccactgctaccattctggggttctgggcttgaatgccatgaatacctactaaagcctgactatcacggttcaccagtttactcctcacactctggatgttgtaatggtatgtttacttgtgtgctgataacatgttatatcgtcttccctcaataaactctatgctccactgaggacagtctgctttatcactacacacccagcacagtctcccacaaggaatgaatgcgcagcagacatttatctcagtgaaacagcaaacagggtcttgttctagctttcttcatctctagaagtggaaatcaaagctctagaaaacactgaggctcagggctgaccagtctggaatgagaaccatgaccaaggttactgagctaggactaaggacaggaaggcacgtccctggaattgggaacaggaaagggaagtggagttcccacacactgtgaccatctctaaccacttggaaagcaggagtcctaactgttttcgcgttcattccagactgtcccaacagtagtcctttaagttacttaagagttagaatttgctgtttcctttaaaggcaaagacaaaagagtccatttggccacctcacgttgtcacttctgtttcatggagaccttggcctctggatccaggccaaagccagaggaagacctgatatcctgaagtccaccccctttcctgtcccaaatgctgtttgcataggataactgctgcccacacactagttgactggtactttggacccaaactgagctttggacccttttgcaactcaattcaatgtattctttgcccaagagatacactggaaaactcactctgattgatgtaccccatgagtctgcacaatgagaggacagcgagggtccataagagtcctctacagacaagggcacaagagcagtgctgcctgtggctggcgttcctcagctccgggcttctgcatattctttctaattcccctagctgctccaagaccttcaaataacagaccagcaacacattcaccactcatcaggcaaattcttgttacacatgttgtaagtaccaggttctgtcctaggttctgggccatgggtacagatgctctcaggaccaagggatcatgcagtgaatgtccaaaatctgtggctatcaaggggcttcaatctcttcccccttcataatgggcttactctgtgagctaagaaagtgccaaaggctcacacaggttctcatcccttaaaaaaaaaacacacacacacacacaactagatgattagacaggagtgacaccttctcagcagtagctgaggataaagccaagtcaacttttaaaggcctggcctgtaaggatgtcaggagataggttctgacgttacttcgggattgagcctgtgtccatcagagagcctcagctccaacaactgtacaagaggcaggccagatcttggcagcacctgctctgctcataaagtatctgtgactggaaatcaactgcgtttctttctgatttctcaaaatggatttactttagcaatcaggaagggagatgactcagacaagctggtaagcagtgatgtatcctacaaaggccacctgtgtccaaggtctgtgtccctactttccacttcaacaggaactcctcagtaagctgtgttcgactaaatctgcctatctttccaatcctagtaattttaaactcgtaagcataatgaaaatacagcactgagcaagaagcagcaagatcaaatccaatgaagacctgctcagaggagataaccctagccctcattttgtgttcctggacagtctgctcctgcctccttcttgtctgcgcacaagaatccatacccgagcacctcctcctccgctcaagcttggtgctaccatgtggctacaaaagattgggaaagggaaccaacattgagaaccggagtgaggagggctcaagcctctggccccatatcagcttcttcttgactgatctagagagtctcatcgactccttgtgcctcagtttccccatctgtaaaatctggtatttggagcaggctctcttgagacccacttttcattgctaaagtgatgtttctttctgtgactcatgaacgcgcccatcaaagcagagacaatttcccaccaggcaggacactgacataaagaggaaaatgtaacagacttaggaccatcaggacctaggaatgactctgaggtacaggaggtaggtaagagaaaagtcagaaatgtcaaaatttgttgattttttaaaaattataccattaaaagtgatgtaagtctgggtatggtggtatacacctgtaatcccacatggcactaggaaggggaagtcagaaggatcaggagttcaaaggcagccttagttatatggtgagttccaggatatctgaaacttggttgtactgcctagttttgtgtcaacttgacacagctggagttatcacagagaaaggagcttcagttgaggaaatgcctccatgagatccaactgtaaggcattttctcaattagtgatcaagggggaaaggccccttgtgggcaggaccatctctgggctggtaatcttggggtctataagagagtaggctgagcaagccaggggaagcaagccagtaaggaatatccctccatggcctctgcatcagctcctgcttcctgacctacttgagttccagtcctgacttccttggtgatgaacagcaatatggaagtgtaagctgaataaaccctttcctccccaacttgcttcttggtcatgatgtttgtgcaggaatagaaaccctgactaagtcactggtcttgaaaagaccaataactaaatggcagtctaacacagcagctattcgtttaacagagtctaacatgtaactgttggcgtcagactatcagcaaccaaacgctagcaatgcagacctctgggaaactcctgaacctctctgtacatcaaatctgttatctgtaccataaagagaactacctcatggggtttaagaacagctggtacaataacccactttgttggctgtttggttcactggtagagctctggtctagcatgtgcaaggccctgtagtttatctacagcaattataaaacaaatatataaataacacattatgtgcctagctcatagaagcacattctaattatcctcttttattataaataacaatgtgcattatattttgtcattattactaatgacaatggacacatagattctagtcattgctctctcactagtgaccttgaattcaagttcctcatttgtaacattaaaagttaatcaaaaactcttgaaaaactggaatcaatctctctctctctctctctctctctctcactctctctgtccctccctccctctttccctgccctgtctcatgtgtgtgtgtgtgtgtgtgtgtgtgtgtgtgtgtttgtgtgtgtatgtgtgtgtgtgtattcacatgaacattcaaaggattatacctgggttctccatgaagattttaaactttctgtgtttccatttcaatgatcatctgaacaaattctggcacacctatgtgaatttacttacattagcataacttgtgccacaagccatcaacggtcaggtttattagtgtatgcaaagtatgaccatgccagcctattgatgggattagacaaaaggaaacccaaatggtatcaaaagatgctgcccaagtagaaacatgggtgaagaactaaatcatcagcacagagtaatatagactggccaaactcaaaatggccaccgttgtatcatctaccaccatatttcacgtggcaactgaaatattgtatttcagctaaacaaagtcagttttctcactacaactaaggtaataatatgaattgcgatgtctttcttcagtttcatttgccttgatttataaatctgtatggggcctatggttttatcatcagggtttaaatctacttttacttacatagttaagtcattttataataaaaacatcggtgaacaaaagagtacctcgggatgtttgttctcgcatagaagatctccaagtactagtctactttgagaaacagttaaactcccttcagggttcactaaaggtctttgactttcaaagacctttgattatagacaggttgaacttcattaagatagccaaatggagatgcaggttggtggtccaacaaaaagtgcaggacaggaaccaagtttagaagtgagcttcagagacacgtagctaaactgagagggcaggatgagaagattcacagtggtcacagataaaggcgccacatggaaggctggcctaagcctcagggagctcaccttgccctacagccttcacagtcttccaaaggaaaacaacattcacctaccaagtaatggtggggcctactggattattcaaagaaagactggcccacatgggaagtgggcggcttagagacctcctcagacatggcaagtctcattactataagagtccaggctgctgtcaaagctgaggaaggctgagtgctgagatctccaggcacacctctaagacctgcttcagtacttcactttacaaaaacactggggcctacagagagtgctcgtgggtggctccaagtagctaccaggaatttagtgaaaggagataatggagtgatggggagtggggtcattttctgccaggttgcagaggtgagagaccatgcccagaaaccagcgcaagcccaagctattacttcttcctgactgatcaccttccctccatgctaagtcatgggttcacatcagagccacacagtcctgtgtccacaagaaccagactcattcaattaccaccatgtgaaaaccaagagcacgctcttccctccctctccgatccccagcccaggccccatggagcaagcaagcaagaaccccacagagaagcccacagcttactgtttgtctccttcgaaatgtcagattcttccacagcagcagccttaactgaggccaacaagccatgtcaccacagccggcacccacagcgacctgcgtctgcggctcgagagccctggagggagcagccagagcacagagctgtgactctgtggctggtcattaactgaaagataaaacgagagagagagagagagagagagagagagagagagagagagagagagagagatctgtcaatcactgcttcaaagccctatgccggagaagagttgctgctccagccctctcaccagacacctctgacaccctggtggcttgtcaaaaggtcatgagtcctggactgccaacccccagaatctccagcagacagagcttccggggcaggcttgctggctataggctggcagctggtcagacgcaatcgatggttctcatcatatgagcaccactgagattattttaagaatgagaaagtaactttccctggccaaaacaaagatcagacgtgccatccaagagcccgagaggccagcctgccttccctatgaatatatgttttctcccaagacccatcagcagcacttataaattctccctgatccctggagtgactagtgatattctctaacatttcgctacagacaaagctgagcccttcaagtgataaacggcatcatttgcgacgcagtttccccaggtggaaggctgaggactgtcttagacgactatgcgtaagcaccagagcagtgccacggacacctggctctcttgtgatatggacaaagcttgtgttgtgtctctgtggaaagaaaacagtatcccacagaggagagagcctgccaaggcctgatcccagcagggcatctgtgaacgcaggaggctcctacagttgggacatatggagcacacttctggacttgctctacctacacctgaacacatggccgcttcactcctacacagatgtctcaaaggtctccctggggggaccgttcaccatctgagagattttcacaaggaggtcgtacaacagcctgtgtcttccttacccagtggccttattacccactacccagctgtatttattcaatgctgagaaacttccaaagacttcagctaaagcaagctaaggattaaggggaaattgaaaagtgccaggaggaggagggacacgtggattattaaagtcaggaccatgcaatggttgctagtcacaaaccctcagcagaaacctatgaagctatgaaatgactcccagtgactgtggcgtctagtagccttctgttgtgcaaaggtgaaatatcagggtgaaatgctaagagacaaaaccaaaaacttcacccatcaagcccatgatcttgaacaacgcgtgggaggtttttgataggattttaagtccctgtgatacccttttgttccctgatacaagagaactaagattaaaaatgtctaggaaagaaggaaaaagaaaacaaaaatcaacatgtccagaacaatgggtgcccgagagcggctaattctagctcatttattagtgatgtaataaaccggaaatcctatggtagtcaaaccctagagtcttctttattgttgctcagcaaatccagaaagggcacaggctacccacagctccttactgcaaaaataagatgacttaggccaatagcaagaggaagacctagtcagtaccatttggctagcggttccctgttgagagatgccaactggactcagaacactgacagggaggtgaaaaaattgtttttaagtggcacttaaaatattaaagaattattaaccgagtttttcttcagttaaagccactctccagaaatcacttagctgacttatagggtacagaaattttctccgagcccaccgtaaaatagaagaaaggctgaaatacaatcaatgtgctgcaacaaaagggaaacaaagcctcagaatgaagcctggaaggcactagctcccagatgcccaactgtgatcctaggacaagatttatcttatcggctctgagcagcaagttcctcattccgacagggggcagtagtatctcccttgtctggtattttatagtattaaatgaggtgatagaaataaattcagaatgcagtgctaggcataatgcaaataacaaagaaacccaggtccccaggtcccacccgcaccctcagctgcgcggctgcttatctaaagaggacattcttgtttctgaaagtgaggggtggggtgaatgaagtaggaaggacaagctctgaataccttagggtcactctctggggccaaatccatatctggaattgtttcctgactcctgagcagagatgttcaggggcaaatagagacagagccccacaccgtgctcatgagagaagagagcgcagccctgcagagcgcccttgggatgagacgaaaaactggattttcttggaggacattttcctagaagttgatgagtttctgagtctctgcaactagtttcagattccaggctccccagggacacagcacaaatgtcatgagactagaggaaaagttcttctctgggtgtgaaaacggaaacaagtgacggtgacgttgcagcccacccctcctcctggacacctgcataattctcacccatacccccatctctgaacatagagatccatgctgagggcaatgttcctcccaaagtgattggaaataccttctacccaggtaacaaaagccaatgggacatttccacatcagtttcccaaggaagtgaacaaacaaacctccaacagcacaaggggaaaggcagttctgtgcgctggatttctcaatgttctgaagtataacacgcttgctcctgcccctgcatgaatttccagacactggctggaagcgagcccactttagaaacttcacccatcaagaaccgttctcttgatcctacgtgactagagtagcaactccaaattggcctccttggctccaggcttgccccattctcctcccttggacacaagagcacccctatttgactaaaatcaaatatctacacatggtacttgtctacccttcaacagcttcctgccaccctggatggagtcctccccaaggtttcctcaacttccctggtgggccttcagcaaggaacacctcctttcacctccttggccatgccctggaggactccccctagggacaagctgcactcactctctcttaggccttggactacactgtcctgttccttttcccagaacaaccctttctccagatctgtgagcctgcctagttcctccacaagtttgggcctccatggggctgctcaggaatccttcctgatcacctctctctaccaacgtctgaatgagcaggttttctgcagtactttccctacccggtctgtccccttctgaggtgggacaacaggattcctggccctccatctctgttatctccggcaaacaaataaatcaataccggcttgttgggagcacttaggagatatggcctcaattatgttttttaaaagatagctatgaaaaacagggtctcagaattcaagggtgatggcattcttgggcctgtggtaactgatttctcaagcttgattaactaactgattcaggcaatttgtccccagggagggagccctgtgttcagctgcttccacagcaagctcaagagagtcacaaaggactgcaaagcttccctggtgagtcctcaggcatcctgggaagcttaagtgaatctaagtctactttgcataaacagcaggtttagccaaggaccacgtagacctccccaaaccactggggtcatggaattggctctctgccaagcttcatgttcaattcctccgagcaatttctctgactctcaccattagtctcccttatcaatctagtcatttccacatcccaaccttgatttgtgcaagacagatctggacgaagtgactgctctaatcttccaccaatttgtttagcaatttttacttcaaacgccactggcatttggaagttttatagagtccacagaagacgaaagactgctaaaaacataaccatcctgaatatgcaaacatgctcacacgagtacttatagggaaatgcaaattaaaaacacaatgagatatcattacacacacacattaaacctaaagctaaagcatgagtaagtctgtggatataatcaaactcaatacactgacttcaggaacataagtcgcaagagccactttggaaaaatgtgatagctttttataaagctatacattcagttatgaaatgatctgatcgtctcaccccattttacccaaaagaagtgaaagcaaaagcccacacaaagacatatgcaaatgtttacagggaccttattcagaaaagccagctgaaacaaccgaatgtccatcaacaagtgaataaacaaaactgggagtattactgagcaataaaaatgtacccagcattgacacatgcaacaacacacacaaatctcaacagctgtacgcacagagaaatagagcagacacaggaggcagctatataatatctaagttgtactaagcactatgaaaaaaaatgaaatgagaaagcttggagccaaaccactggtcgtcaaaggttataagtgagaggagaaaagtccacagaggagcatgtatgactcaatattgggaaggtggttggagttacaccatttacaccattgtgtacatctgtgaaaagcccaactgtatactttagaagggtaaattttagagaatgtaaatcatacatcaacaaacctaacaccaaacagtctctaaagctattataatacctagcataccccaagagtacaactatgctttaaacctaagggttgcatactataaggcctgattatggtaggattcccggagagggggtctagtaggtcaatatgaaatcattacttagtaattcggccaaacatcctcatccccaactctgccaggctcccattaaccacaacacatatctagtgggagcctatcaccagtgatgtgatgctccagacccttaggactcagtggagagtaagagaggcatagatcctattctcagggatgggggtggggctcactttagcagagaaaaatgggaaatggccacatgagaggaggttccctccaatgaaccatctctagaaggaagaagtgagaagatgggccaactataggctgctcaccagccagcattatacattctttttacacatcgctaaagcaaactggaaagccaggcagacagactctgacagtagcaaaagaaaacacacacacacacacagagagggagaggaagggagaagctcataggaaacttgggaagggaaatgatggtgctaaccacttagagctctgcctaccactctcttcctgaccaggtcattttgacattttgaacttgacaaatgtatctcaaagagagatgagagaagaggcaagagacctactggaaacagaaggaagaaacacaataaaggtaaagtcaaagaatttatcccccttggtcagcaagtacgtcttcctcagactacctcaacccggaagcacttagtctgttgacagaaatgtaggacagggccgggcagtggtggcacacacctttaatcccagcacttagaaggcagaggcaggcagatcgatctctaagttcaaagccagcctggtctacagtacaagcttcaggacagccaaagatacacacagagagagtgcgtgtgcgtgttcgtgtgaaagagagagagatgcaggagacaaagtgtgtgcatggccacactgttactagaaacccttgctgtttggggacagaagggtggacttgtcatgttccttcctgaaagaatacaagcatgattccagtgttaggctccacgagagaagagtcattcaacccatgactggcaattccttagacagtgcctgtttcccaacagcaaaagtcctcaagcagagaccacataagtgtcatgtctcactagaactgagaagttggtctttctggacaggaaaggggtgggagctccaagtctgtgttccatatgacagctgtacttttttttttttttttttttttggtttttcgagacagggtttctctgtgtagccctggctgtcctggaactcactctgtagaccaggctggcctcgaactcagaaatccgcctgcctctgcctcccgagtgctgggattaaaggtgtgtgccaccacgcccggctgcaactttttgagaacagtcacatgcctttgagtctctcttgagtccacttagtcttctgaatgcgttctctcctcggtgccatcaaaatagttcagaaacttagcatgtgcacccagcaactaattctcattttcaaacagcaatgggtatatgacagccattctccagaactttcaataaataaatatatgtgtctctctatgcatatgtgtaagctctgctttcttaagacaacagattttcagttagcagaaaccagatgcaaggtgaaatttctgaccatagctggaggcatgtcttaataacagctgtctgtagatttccttttcttaggggaggtaaaaacgggcaattgaaaactgcgtgtatctgcggtgtttcatactgctaaatggcgaggcagttaaactacaaagcggggaaataggtccaactgtagccgatatgcaaaggtgctgagctcaactgattgcatattcatgagatagtgatgcaaaagcaagaccagatgaggctccggcctcatccccagagggttgtgcaaggtcctgaaatatcaagaatgaaacctgtaagcccaacagagtatgcttgctatagaaaaggcctgttctctaatagcctctcggagcctatgtctctggatcagtagtcacgttcagggagaagcctaatgaggttactaaaggccaggagacctggctggcacaggctcactgcatccatgatttcacaggtaggctgctgtggaatgggagggattgtgagacatcctataatttctccaaagctgacccaccagcttaatccatgcctgaagctaagctgactgtcttgattagccttcctggcctctagtcttaggctcactaccccaaagccatcctcgttagtggtcccttaaatgctcccttactcaaatcaacaaacaggcaccccagaaatgatgtcactacctaaagataatattcttaacactgcatttcttaacactgaaatgtgtaaacatcaaagagggcaagaggtcttcaagacaaaaatcaacctcaaatgaactgatcctgtcactgtttaagaagaggctgagctaagaaccacccaactaaaacgatagaagctgtggatgctattgtgcccaacaattagaactggggaggcagcagggctcaaaatgccaaatgcatcaaacgtacatccttattcgtaacagcgagattataaacagctgcatacatttttttccccaacctggaacacgtagccaacttccaagacaaaattctttgtgcatagcttcattttcaaaacaagagctatgaaattaaaaaataaaaaggaaaaccaatagcggatgtgagaaaggcatgaatgttgtgccgatctgtaactagcctttgagaagcaattgctcatcttaagcaattcctgctgttgttgacaattctattctacaagagatcctgaaagtcaaaagctactcccatcaagtctctctctgatagttagacagtcaatgatcctatttaccgccctcagagttccagagttgctatcagctacacaaatggcctctggacttcttttaaaatgcttaaaagcctggcttttctgaaagcagatctgtaccgaaccgaaatccttgtccctctagagtaaaattaggggaaaattctaaccgaatgttaaaagatcaccccctcacctctcactgatttccactaaacaaacacagagcaaacttcaaaggaagaatttagcaaataatacaagcatttgctttttccctggtcagggggatgaggcacacaaagaaatgaaccttctctgactgtaggaaccaaactaccctcatgactgacttgtcgcaagggagaaacataaaaagtcttcaactgcggtcaaaacgctggagtaaagatgtactttggcaggggcccagagcatcctttaccctgatctacctgcaagctacctgcaagccctgatttgcagacaaacttgactggataataccgcctgttgttctaagaagactttccaagaacatcttgggagctgtggtccagtggcatattagcaacaaccatggtatgtggctcacatcgctgaaggatgctaaggtatggatggcacagagactattcatcgactctggaaccctaaagattctgacgccctgcgtcctctgcatcaaacagggctaatagtgtctataaaacatttatctagttcctggaacaagagaagtactggatgcactgttattgaaatgagtgttacccacttcacggagtgaagcttccatccagggtggggctgagagtgagcagacaattaacggaatctctctcctcacttggtctacagagagagtaccatttccttccatggcctttccagagcacggcactctctcctgagcccagactactgagagaagcgaaacttacctgggtatctctggtagcaagcccttcaggataccaagggtttaccataaaatccccttctggggtctctcctctctccacattgtcctgtcattcagctgttttctgtagcccacggctgctttccaacaagttgtgcttgggtcctaaagctgcctctgtctcatttcattcgacttctaaatcaatcatcttagaagtctgggcttccatcctgcacctcttttcccatctacctaaactcttccctggttgctggcttagcaagtgcaccctgctgagtaagttgtttaaaggacccgaagccaaggcaccatttccagctgtgttacaaagcaaacaatagactcatgtgaacataccagctgaaaaggacatcttcgggggggggggggggggggggggttccggggactcatcccaaactataaaacagtcagcactgctcaggaacccaatgctctaagcccacaggttcaagtcaaagacttaaggaaccctttcaatatctgcacacagcttttctacctcaacaatttactgccttcattttcacataatggagctcttgtccagggccagcttagagatcaggtgactggtatcaggacccttctccagattgccctttcaccagccagctccggaagcaggccaagcagatgccctgtgtccctaacatgccagttctgcaacacagcaagcgccaactaaccaggtatgtgagaacgtcattcagctgccatcagtcccaaaggcccgagtccttccctccagtctgacaccttctccacaaaaagacaaacaagccactttgctggctacctaactagaggaggagaaaaagaggaataagaccacaactggttctgaaaaacaaaaaacttaagggtgtgtccactttttatttttttagtattgacaacaagaaaaccgttatttgggggttgggaggatcctgcaaaaagaaaattcatgtcagatgagtccagtgttatcaaaattctatgcattcctttctttaaaagtgactctgttattaagattccacaaatcaaatactcagagtagcaagtgaaaagtattcaggggaaagtggactcatctactgggtggaacgttggtagcctcatttaaaaaaaaaagacagattttatggtgccatttaaaaagtcgcacaccccagtctccaagcaacactgtactaagtggctacatcaggtgatagccagtgtccccaaatggagctctgtttgaggacagagtggcctgttgggctctgcaggctctgctcactcttctctcctcagcaggggagagccgctcgccttctgatcacgtgaagtgtagcctgcactgcaaaggggagaaatggcagccagtccagttaaatttgcaaatccccataagactgataactgaataaacacaagccgaccaaaggctggctgtattctaaattcaaggtcccactacaactaacaccatcattcacaagtttataaaaaagaaatacacctgccgcgaatcacaacaccaaccagaattagtatcagaattttatacttttgcataaagaaaacatcacctcgcagacccttacttagcatccaggagttctgtgaaaatgttccttcttgtttgaacttaaagctaaaggacactttgtctttgggaaagcaagaagagttccagttgaaaaagccccttacaattcaaactgggccaacagagacaacaaataaatgagagcaggccaggatttaagaattccatgtctatttaatgtacacgatttctctttactattctaaagggcattataactctgtattctgcaagaagagaagccatccaggatcaaggaagaaaaagaataagaatttaatttccaattaatgactgctcagggagtggatttagacaagaaatcttacggctttgggacacaaaacaaaggcatggttctttattatgaagagactagaatagatgatgtttaaaacaaaaagaggctggagtgacagcacagttggtaacaaccatccataaactccaaatccacagaatgcaaggtcctcttctgacctctgcagggaccaagcaggtacacgttatacagacatacatgcaaggcataaatgaatcaacataaaataagtaaatctaataattaaaagtttaataatggctttttaaaaaattctgccagggcttaatgtacccagaagccatagaaataaatataatccagtcagcaaaagaaacaataggactgcccctactcccaacatataaaacggttcatccacttcctcatacacggatggatggaaagggtgaacagcagtcactctggggatcagtatcaacgtgctaccaggagtccaggggagtgagtttccctaacactttcaaagaaaagcgtcctggaggaggcagcaagagaaatgttgctgaactggggatcttgaatgtattctcaaggcccatgtgttaaaggtgttgtaatcaggaggtagtgggaccttcaggagtagagcctggcctagttagcaggtttgtagctcctcagagaggacaagagcttcctttatcatccatttacctgtcgacagacacctagactggtaccattccttactcctgcgtggcccccaagtttttggaaatgacacacaaaaacactctagattttaaggcacacaccccaaaactgtgaaagccagaaataacacagaagaggcttctgtacttcttaaagtgtctgaacctctaaatcacataaggagttatctcacgcttatccataagagcacattaatgaacaactcaaaatatttaaatggggcatcgcagactattgtctcaaatccctgcagctgcctcaaaaagggaaatggaactgggtgagcaggactattcgtctacttgagtcatctagcctaaatcatttaaacacgcaccaagatgcattaatgacgtccgtggccgtatcagtctctaacactttgctgagaatgtcttatttgttggagtagttttaaaacacaggaagcgagcagcatccagccccttagctgactggtatttgtcaatttccgtattagagagacagattacgcgcaagggtcaaagacctctcttttgaaacctaagtgcatgacatacgtgagcacggggctcagatcatattctgcatggaagtgcagaatgggagggagttgggggtgcaggagacttgtgaggagggtaacattctttctgccaggtcttcaagtttgcaaagtctcattgttttagaaaacaaacatgggctggagagatggctcagcggttaagagcactgactgctcttccaaaggtcctgagttcaaatcccagtaactacatggtaggtcacaatcaactgtaataaaatctgattccctcttctgggctgtctgaagacagctacagtgtacttacatataataataaattttaaaaatcttcaaaaaaaaaacccccacaaatgtgatgttccccacagtcaacgataatcctagacaagctgcttttgggccattcgtgtttgacagagtatggtgtagcttaagacctgcctgcagaaaccatttcatgtctgagacgttcactcggactttatgccacctggccccataatctgtagcaaactactctgaggtcacacactattcacaattaattagctgaggcaagaggatcacactcatttaaaaccaagttttggctttgtttttaaatgagaactgagcaaatgttactgcctgggttttgttgttgttgtttgtttgtttgcaccgagttgcagccaaggtctcttccagaagagaatttgaccgactaccccagagcaaatatgggaatatgatacagatcataagtttccagtaaaaatgacagcaaatgaatacacggcaaattccctttcacggcatctgaaattgtaccactgtctcccctaatctggacagttagagactttgggaagtgaattcaaatctcaaatcagcctcttggaaaatggagagccaaggaccagatagcctcccgccttcttaacctgtagttacaataaacaagtttggcttgaagataaactcagcgtctgagtaacaccgggaacagcaccaggtaagcgtctattaagacacaaacacgtctataattggtattccaggtgctttctcttccgtgtgtaaagctgtctccaatatttttaaagcggaccttctcccaatgcaagtaaatcaacaagtattacgaccaatcttttaaaatttaatgccagaataattgaccatagttacattataatttcattatttatttaacatccagaccatatataaaaatatatttatacttgaatgttttaagaacggccaaagctatacacatatatattttctaaaaatccaggaagtccctaatttaagagtttaaagaagtgtccatttaactatcttagaaactaaaaagtatattttttttaaaaaagcaaagatctattttcagtcactacatatgcagcccacataaggacactgatttatgagaggaaaaaaacgatgcctaaagaaaaaaaaatactaaaagtcccagctcctctccacataggtaaggtagcacatagctgagttgctaagtatcattctttttttttttttaaatagtgtttgcattggggtttccatgaagagaggtagaaaaccaatcagccccagtcaccctttccaattccagactaattcacggtctcccatcaaccacgcacacattccaaatcaagatgcatccaagggccacaacaggcctgcctttgggtgctaataaaaaatactttagggggctggatttaaaatactcatcttcgggaagacacccgtcacaaatacccaagtcaccaccagtgacccctccagaaccccagtgactttcacaaggagacccatgacttattctatggtagcaatttttgctccaaaatggtactatgagcattatgttgctgaaaatttccttccctcaaccctcagattcaacttgttaccacatagataataatcaattctgtgcatcacacctttctttaaaaaaaaaaaagccctattttaatgacttgtgatagcgctgaggaaaagacatgcttacaatagaaactgtaatttatctttattatttatatattgatatactatccactcaaatattctctatgcttgtctatacctcctttgatgtgggggaagtgtttttcaacaatgggaacagcaatacgttgtccttatgtgtgcattagaatattaaaaatgggctgaaagaaaagtggtgatgataaacaactcctttttaattggcatttatgtcttgtagagtatcaatacttgggtcagggttccgaattatgactaagaggtaagggtgtgctttcgagcctgcaggcatgtgtcaggtgtgtgctgtgggaggtgagggctgagccacagaaagaaagtggtgtaccaattctcttcaaggaaggtttgtgctgttttgttttgctttgcttctgtggttggtggtgctagaacccaaggtcttgtacaaggtagactctaccgggggcctacatcttaagccagaagtgttccttttgtttatctgtcctttattgtacatttattctgcccacttccttggaaggatgtcgaagtaaattcttgttttgttttggaatggtgataccattgcagcaaatggggcaaactaattatttctagtgacacttagttttcccaaacaaacacacaaagtcaaaaaaaaaaaaaaaagcaaacagtttaataagtatttctctcttttccagaggtaagtgcagaaaccaaaacaggcacctatccacaaggttgtcatcagccaacatccccaagaacctcattgagcaacggtctgggagtcaggaaacaaacaaacaaacaaaaaacaaaaacaaaaaagaaaaaaacaacaacatgaaaacatagactggctttcttggcctcgggtttcctcccagtttggaaacaccagttttgaccagattcacagtgaagcaaaaggactagagactctcactccgcaccaggccatacctaggctacccggccaggaggcgctgcgggccagtctccaggggccacccgcaggccgcccagcccccaccccctggcggcggagcccggcccagcacccgagctgcgagttctgtgctgcccgatggggttacttgcggtcattcggctgcacaacctagccccagcttcccaatcggtgctcagcccgaagtctccccaagggaagactagcaaaaagcagtaagatgagggtggattgggcaccccagtttcgggtttctgcagactctcttaagttttctgtctttagaaggaacaaaagtggtctcccactttgcgccagggactgcagccctccagagcgcaggaagcctgtgggcaggaccccggagtcgaacaaagcccagagaactcaagcagcagtaacataaaagaccccgtttaggacacttcctactagagttctttggaaacaaggacatgcagtcccagtcccgggaagagaacctccaagtcagaggccaacacaaaccagttaaataatggagtgaggactcagatgtgacacttgtgggcgacggcctaccccgcgccagacaaaaggagaccctttgtagaggattcccttctccctaccccactggctgtaccccgaggacgtccgggaaccttggctcacactgcgcccaagaggcgagtctccgacgccggagatgctctcgctggtctccgattccgggagacccgagtgcggcagttctgagtcccagggtcgacagggcccgtcccagaacattctttccctgtttatgcctcccctgtactatttgcatccccagaagtaaggtacatgggagttcgagtccccccagtgtccccaaaacggagagcttcccaacgcttccttggccccgaaacaaaatgcccaagtcactgaagaacctcttacctgttttccactttgctgtttgagtctgttttccctacccctgcacaaacccttccagaaaggggaagaaaaaagtggggggaaacagggagcagagcagctccccaagccggctgtggttgcgcgggtcccgcggcgccccctgcccagctttgcgctgcgccgcggagagaagtgggctctgccggtcccggcccgctcgctcgccctcggaattactggtttttgccgcgactagttccttttatagattcggctgtgccgagcgccggggttactaccggtcaaacgctgttctctccctctttcccccgcccccttcccggcctctgtttatgtagttcagtcactcagcagaaagcacgtggagacatggcccgccccttaaaccggcgacagtgcgccgccgcagcgggcactgggggcgcatggtgagagctttgtggggcccgctttctgtagccctggccctgacctgctagccttcgggaaacgggaaactccggacttgcgctgagccagggactccacattcccggcagaggaggaaaggggaaaagctcgttctctaaactcctctttctgcaattgtttggggttttgtgggtgttgctttttgagttttgtttgttttgtttgtgtgtgtatgccctcttcctctctccctcccgctctcccttactcccactctcccccctctccttttgttagtttgctcagcccccaacttgggaaggaaaactccccaccccaccccacccccagatgccaaccattttcggtctcttccttttcttcctttaaaagtcctagattgggggaagggatgtggaatggacagtgaatatcagcctattttggtgtctgcctcaaacctttacattgattttgaagagaagatctctaccttccagggacctagtctgcaccttctacacacacacacacacacacacacacacacacacacacacacacacaccttccagggacctagtctgcaccttctacacacacacacacacacacacacacacactccactagtaataggtacctataagccacaaggggcagctgtggtcacaagagtgggttttgatgatgtcaaacgaccaaagttagataaagtttttctgcctctattttatttgttttaattgagacagagtctcatgtagtctgctcataaactcaataaccttgaattcctaatcctcttgcctcccaaggcctaaaattacaggaacagagtaccacacccacatttgtacagtgcggagagatggaacccagcctcttgcatagcaggcaagcattcagccagctgagagctacatccttggcccttgcttcctgtctctcaagagagaacgttctctctgcctcagagttttctgaaaatgaatttcgttggaacttttgaagtcctcggaagaagagtgccaacaccagaatcctactgactgaacatcagtgccaatctctagtgacatccataccctataaaccatttcctatgccagacttttaaaagtccagcactggcaaagaatttaaaataatatgtgtgaccatctgtgtacaaaggaaaacgcctaaggggaaaggatcgttctttgcatgattttaggagattaagtctttatgcagcttccctcatttcccccatatctcctagcacctaaaatacacacacacacacacacacacacacacattctttttgtactttgaagaatttggttcccaagagtactcctactaaattctgttcccagcatccacttgctgctttacaaccatctgtaactccagttacaggagagctgacacagtcttctggcctccataagcaccaggtgtgtacgtggtgcacacatgtgcacataagtaaaacactcatgtacataaataaatctctctcttttttaccctaaaaataaaagctaacttcttgggtttctctaaaagagcgtaggtgacatgtaagtgctacccaaatcaggtagttaggaggcagagaaagaagaaagggtgggaagaaagaagccccgggcagagcatcctggaatcctcactatatgaaggcaatgaccctgaaatccaacttgcagtgtttaactaggaagccctgtagggttaggaatctgcccctattcaactctcactgcaataaatgcacaaatacactgcagtgttggcagtatgtgtatgcatgttgtaaatctctacccttcgacacctacagaggccaaatgcttcatccaggttacacctgttgacaccaagtgacatgacctgccatcaggacagcacctcatgacacaactactggatttcaacagttagaacttagatgatatcacacttaagaaagaaagaaatttcaaagcaggaatttctccatcctttgagtacccctggttagtttgttcctgagcatgctccagagagctttcccttccatgtcttctgatgtataacaccttcacccaaacccccaaccttgtcctaggaagccctttctacctgagtggaaaggcctatctttgttactgttgctctgaagtagtggattccataaacataccctgggttgcttgaggttctattctgagctgaccctgggatcttctaattacagacttgaccttcaggcaactatggctctactgaccttgctagagaggtcatagagatacaagaagctcaattttatcatcccatgaaggcttttaaatcaagattccctgaaagtcagtgtttagaggatagtttaaatgcatatctaggagccagtctacagtctacaaacaccttccttaaaagagagaagtttttgttgttggtttttttttttaacaaaagatattcactacacgtgtttcttgcccgagatacctactatttggccccctgcagctgaaaaaaataggacactacagaaaggcaatgaaaattttctaaaaaaaaaaataaacaaaatgatttttcaaaataaatttgtagtgattgagaaaacctactagcagctggagagatggctcagctgttaacggctaggctcacaaccaaatcataaaaaaacctactgcttagaacattagagaatgagatataactcaaaaattcaaaaagaagactagagagagatctcaatcgataaaggagttaccatgcaagcatgaaatcctgagtttacatccccagaacccatgtgaaaagccaggtgtagtataccagcaatcccagcatctaagagctagagataggagatgaatggagtcagctcgccagccagtctagcagcatcaatgagagactgtgacgtaataaataagtaaataataagtaaataaataaagcgaagagaaattgaagactcctgatgttgatcgctagctttgaaatgtacatacacacacatacacattcacacacacacaggcacacatacatacatgcatgcacacctgtacacacacacacacgcacacgcacaggcacatgctcatgagcacatacaggcacacatctccctcccctaattggtaaatcacctttaatgaagagagatgaaaagacttacagttcaagttttaatcagcttaattccgtacccagggggaaaaatcctcaagctatcagtgatcaaatgagaaaattcagtgtgccaccctttataggtggaacaggctctaaaccacgtagactctgaatgcagtgtgatttcttttgagtggaccaatgtgattctttctgtactattgtaaattgtattaacacccaagcgaggtacaacactgtttctatcctggccttgagaaacatatatttgcaggtttttgttatggtcaaccagttattccaatttgtaagtagatatattctgagcatcaggcagaaagtgagatatactgttccttaaagctacaggtccaatctgcctcctccaaattaccctttctttaacattacaagacattacaggaaagtttcaattgtctctttcttgtttttcattaaactctctactaaatgcccaggctgttctgtccaaattctctctctctcactctctctctctctctctctctctctctctctctctctctctctctcacacacacacacacacacacacacactcagcaattggcatccatagggctaatctgaaattgtcagtgttaagaagatttatatttatattattagaaataataaatcagagtttgctcacttgattttccttttttatttgtagctttgactttgtttttgttttccttaagaaagccacttgttagctgggcgtggtggtgcacacctttgaccccagcccttgggaggcagaggcaggaggatttctgagttcaaggccagcctggtctacaaagttgagttccaggccagggctatacagagaaaccctgtcagaaagaaagaaagaaagaaagaaagaaagaaagaaagaaagaagggagggagggagggagggagggagggagggagggagggagggagggagggagggagggagggagggagggaaggaaggaaggaaggaaggaaggaaggaaggaaggaaggaaggaaaaaggaacgccacttgttaacatttatcagcacgaagttaggaagacattctccctcaaaaatgagaaccccaaatttatcatcttcaccttaagtattccccttttgccttcttaacaacatcatcaccctgtcatctactctgggaaatcacagtcttgcttaacacttttatctttgtcttcatcgttctcttctcatttgaaagaacatcacggccaggccagaggtaccgcctacaaaccttttaaaggttttggttcttctccatctccactgtctatttcaagcctgaaatgtggtcttctgtattgaaacgctgctccttcctcttcctatttatccttcctagaggaaaattgttcacttggggaggagagggagcaggaggtaactaagtcacccacagcaatagtaatcaccctgtgcagcactccagcctcaccccagacttcatatgtcctcagcttgcaaaaaccaaacaaacaaccaaccaaccaaacaaacaaacaaaaacaacaaaagaattacactccaactcccttagggagacctaggaagcatttgtttgtttgttttttgtttttgctgttgttgggtttttttgtttgttttgagcccgtaacagctgatgatctcctgcttcctgctccatcctctcctgctccatcctctcctgctccatcctctcctgctccatcctctcctgctccatcctctcctgctccatcttctactgctccatcttctactgcttcatcttctccttctgctcttacagctgcctgctgctgtctcacagactgaatcatctgcttccctgggttttaaaacccttctatcatcttcacctcagctgtcctatgaccgttactctggaatacaaacgaggttatcagatgcagcattaagagtagataaggaggagacctttaaaatatccaaattataaataaaatttactccaaactcaaatctaccaacatgcttcccaatagattcacaaatggcacttacacatgagcagcctcatgtgtgaagaaaacaattggggattaaaggaagcctaacctttattgcagcagaagctatgggtctacatcttcccctattcggagtcctttcctgacactgaggaatccacattcctggcagtgatctagggaatagggagtggttttatgcctttgccaagggctgtccttctctgtaacacacacacacacacacacacacacacgcacgcacgcacgcacgcacgcacgcacgcacacacgcgcacgcacgcacacacgcacgcacgcacgcacacacacacacacacacgcacgcacgcacacacacgcgcgcgcgcgcgcacacacacacacacgcacgaacgcacgcacacgcacgcacacgcacacacgcacgcacacacacacacacacacgcacgcacgcacgcacacacacacacacacacacacacacacacacgcacgcacgcacacacacgcgcgcacacacacacacacgcacgaacgcacgcacacgcacgcacacgcacacacgcacgcgcacacacacacacacacacacacgcacgtgcacacacacacacgcacaaatagttactaaaagataaatcctacaaaagtttcccgatcccatcttctagtcttctaaagaaacaagtctctttcccctttgtctttgtggaccctggggaccactctttccaaaggctggcatttggtgtcctcacagttattttggacgcttccttgtggaccctacatggactctcaacagctgtttggacataatattcacaatatttaaggaccaaatatccaactgcactgtgctccctcccatttctccctctggggccagggttctgaagagttgggctgcccagtaaaatccgagtcttgttttcagctggtccagacttcgtatcagaaggcaatatactccactcttctggtcctgccttggagatcagctaatgctgatctcacatgagcaacatttgactggttccctcacccacctccactccgcaaggagtctgtttaatgttggggctagacagccttgtcatggtgtctaaatgagaaaagaaagcaaaatggaggagtctagacttaagatgtctaagaaaagtaggtcagaggaaaggggaaagtggtataataatgctgtgatacatgaccctgcaatgcaaggtgatcatcattcatctaccatcgaggactcagacccactaatttacgggaaaaaaatttgtcataaaaaaaaacataaaaagtccaatgaaggggctggagagatgggacaagtacctgctgctcgatcatgagaatctgagtgtacttcccagcacccacataaaaagctaggagtggccagggttaggggtgggtagagagtggagggtgggtggggcatatctcaaaaaaaaaaaaaggtagagagggatggagcaagacacccaacattctcctctggcttctacacatgcgcacaccaaaagaaacaattaatgaattaaaaattaggtatgactcaggacatgctcaatgatatttttcctttattgctgataagagtgaacatttcaaaaccatttaattgcctaactgcataaagattctaaagagcctcggttaagttcatattacacagccataagacattaaaagttatgttttcaaagataactcaaacagggaatcgttcatggtaaatattagttgaaaaaacaaagctatcgttctgtgcatatgtgattcgtatttagaagatttttaatatatttacagggttttttttcattgaatatatttgcatagaaaacactataaaaatccctacctagacattaccagcagttttctgtgggtggtaagactgagtaatattttcacacatatctgtagttttcagtttttctggaataagtgtgtaaaatttttagttaggaaaaaaacaccatgaaaagccgtttgtcagtatgaagagggcatttacaactgcattaaaaaaaaacctgcaacttgccacataaaaacagttgtcctcgcatattttattggcatgtatgttgtaagcactgacaacgagcagggaaatctgagacgacaaggatagttaaggctgctaggcatcttcagtggatgggtttatgggttgtcgaagtatatagaaattttgacttaatcctagacctctctcagccaaatgaaaatcccaaaggcgagagagatgactccagggttaagagtagtaactgctcttccagagcagtcagattcaattcctagaacctacacagcagctcacaactgtctgtaattccagagagcccaacacccttacacagacatacatgcaggcaaaacaccaacacacattaagcaaataagtaaataaatcattttttaaaagaaagcccagtatatttaagccttctttctttccttaatctggtcttctgatttttttcccctcatattcatagactatatcttactcatccactctgggtatttatgagttggtcatgtaaattgttgggaccatttggaatttgtgttgttcaaaaaaatggttccacaaagctcctttaacattattaccatcttaaaatacaatgtggtattcctcaatattcataaagatgtattaaatgtggctctttctaatatttctatgtatggattttttttaatgctatttataatgaaatgaatcagtatgaagtgtgactgttatgattttgttagtcactcacatacttatctgttagcatttctctttgagatgcacacacacacacacacacacacacacactgtcaacactgcctgtataaagctttggggagctagagatctagagaggttaggcggttgaccatatttttagtgactcattgtcttatagcttttacaaagcaatatggctaaagactggccccactaaaccccacataccctgtcactcttaggaacgaatgccatactgaccctgacggcagaacccctttgttatgcctcctgatggtacaacagtttagttccaatcagcacttgaatgctaagggtcccctgactacattcggcttctttagcacagggtttgggctgaagggtgttgaaatgttatttgaaatagtcaacacaaatgggaatgtcacccaaaagtctctatcgtttctgttgaaaaaggtagaaaatctgatagtacgatcaacaagggctggagccaacaagagctctcttgatggagatgttctttctacattcccaaagggtctctaagtcagtacttagtgagccacgtacccacatactggacctatatacagacttcctgatgggtagtcccttagactagaagcccttagggagtagaataggaagtggtagcaagatggcggtcagcagaatattttccactctgagaacattctgggagcttgtgagtatggtaggtagtgacttaacctaaattttggtagagttaaatctagctgagaatcctactttacaagttaattttgattactgtattaataatcaggttctcttctttccttggagattccacagagccctgagtctcagtgatgccagcttgagttttagaggcacaggcttatgcttggtactgtacccaacttgagtcataaagccacaataggcagatcttcaaaaatctctaccttcaccagcatcaaaggtctagtaaaatcagcagggaggtgtcaagagagccagaagcaaccgtctttttcggggaccaaagaacacatccaaacctgtaagagctcaaagtttgatctaagtcactttgtttattggcctgaaccctgaagacaaacaaaagatgcaagatgaagaacagcactgtgctgcatgggggttggggaggggaggggtggggtggggaggtggggtagggaggtgggggtgaaatgaaggtggagaggcaataatcaggaaaccctgtgggcagctgggaagccaaagcatccctgagtgacccctcagtgtaacacagtgagagcatttgcagtgactggagaaaccatgcgatatgctaatcattgttctgcagggaatttatcatctggtgttctgagaaatgaccagtgtgtcataaaaatacagtaactccagagtcacagtaatttaattttttaaatggatgcttgaaaagaagttgtttttaagccaaccatcaatttatccaggtataatttccaaattgggtaagaaacaggcttgcatgtgattctctcaatcactcaatgcagaaaattccactttgtatttaataagggtacaatatttgatttgttaccacataagcatttggtagctatttttcccaacccaagaacttgcatcttgtatatcaaaggcaaatacttaaaaatatacttataatgggtttataacccacacatattaaaaggcacaaagttagctaaacaagaaacaataaagtttgactcagtagtactggagtgtgtagctacagtgatgttttgtagtattcagacaaaaacatttttagagtggcgtgacatttaaataaatctattttgacttgggaaatttttaacatagactaaaactcaagatttaaaagcacatgagtcttataaaactgaagataaaactctgtggttttcttttcaaattttcttattttattgtttgcatggggaggggcatgtgtctgtgtgtgtgtgtgtgtgcaggtcagaggacaattctggaagtcagatctcttcttccactatgagtcccaaggctcaaactcagagcaccaggcttggaagcaagtactgttatcaactgagtcatcttaccaagcagaagtaaaatttaaatatgtgcagtactagtgttcatagtcaaatgttcagactataacaaaggtataaaataaaaggactaatagaagaaggggagaagagagggagggagaggagaagggagagggggatcagggggagaagaggaaggagggaggaggggaagatagggaggagggggaggagggagagttagccatcatctctaggcccctatccagagaggacttctgttagtctctggtattcatttcttcagagtttttcctagaataaaatgtacacacttgggaacattctcattttaaaatccatgctctatatatatcctcttgggtaagctaatttttttttctgtataatatatcatggatttttttctatgcaaacaaatgcaaatttctgttcctctttttaaatacacatcacaccttgagggcacaccctgccgtttgtgtctcatttcacatattcatgaaaatgcaaacatggtctaatcttggcacacatactcaaaagattacttaaaatattttttgaaaaataggattgctaagcagttcagtagacaacattttttcctactctagtactcttacctttattttttatttatttttttgttttgtttttcgagacagggtttctctgtgttgccctggctgtcctagaactaactttggagaccgggctgtcctccctcgaattcagaaatctgcctgcctttgcctcccaagtgctgggattaaaggcgtgcgccaccacgcccagctttatttttttattaaatataattttttcatacatagtctgattgtggtttccctacactctactcatcccagatcttccctacctccccaccaggcagctaagggaggaaggagagaaggaaggaaggaaggaagggaggaagggaggaagggaggaaggaaggaaggaaggaaggaaggaaggaaaaaaggaaggaagatgaagataaaataaaagaaaacacacttaaataggacataactgaagggaaatggcccaagaaataaatacagacacagagacccacttgtttgtgcattccgtaattccataaaaacaccaaattggaagtcataatatatacccaacagtatatattacctgtaaggtaaaaagagagaaaagaataaaaataaagatttaaaatgagaaaagccctgatgttatgaggcatgaaaccgccatcaatgctgttgagtttgttttccatcagcatctactgctgggcaggcaaccgacctttaagagtagtttgtctccccatttagactctcttggagtaaactaaattttcattggctagtggtcatcagtcagagattgcttctgggttggggggcagggcttgtgtccatttctcttgtcatctctaggacctcatctggtgtataccatatactcctgtgtatactgcctcagtctctgtgagactttaatcctgttgaattggagatccttgttttcttagtgtctcccatcctctccagctcttacattctttctgccaactcttctgtacggttccctgagccccgaggggaggggcttgatagaggcattcagagtagggccctgtgttccaaagtctctcactctctgcatatttattatctgactgtgactctctgtatttgttcccacctgctgcagaaggaagcttctctgaggatggctgagcaaggcactgatctctgagaattgtagaatgtcc

SEQ ID NO: 615 - DNA, 171244 bp, Homo sapiens
ccatctaaagagagcttttcagtactagctgattgttgttgtgtggaaatacgtcttgtatggtgagatcttccaccttttcaacagaaatgagaaacacaaacatttctgtgtgacacttccaaacttgttggctatttctgtttttctttttttctttctttctttcttttttttttttgaggcagagttttgctctcgttgcccaggctggagtgcaatgacgtgatcttggctcgccgcaacctctgcctcctggattcaagcgattctcctgcctcagcctcccaagtagctgagacatgtgccgccatgcctgactcattttgtatttttagtagagacggggtttctccatgttggtcaggctggtctcgaactcctgacctcaggtgatccatctgcctaggcctctcaaagtgcagggattatgggtgtgagccactgcgcccggccctagttggttatttcaaacaaaatactaacactcttcagcccaaaccatgtgtcagagagctgggtgtggccagtgggcccctggtgtgcaactagtcttcagtgatgctactgtatgctagtgacagcacaactgaccactgaaaatatggtgcacgatggtgaacagattggatttcccgtatctctagaaccccagggctttgaggcaattctgatagatggagggggagcgagagagagaaagaggagggagaggtatcacatgaaagagatactggactttctgctaataaatgggtgggtatttgggtgagtagataggaaattaaaaagaaatatgagagatgggcgtggtggcttgtgcctgtaatcccagtgacttgggaggctgaggtgggagtattgtttgagaccaggagtttgagatcagtctgggcagcatagtgagaccccgtccctaaacataaaattttaaaaaatcagctaagcgtggtggtgcgtgcctgtaatcccagctacttaggaggctgaggcaggaggatcccttgagcccaggagttagaggctgcagtgagctatgattgtgccattttacactagcctgggtgagaaagcaagactcccacatctgagacagagagagaggagagaggcagaccatatttgaactccaggctggtgaataattcatactgattaatttaattgaaaatatttatttaaaatttgcagatcggagttttggaaaggttacatttattaaattattgttggactatgaggaacacattgttgcttggaataatatttaattatgatgatgatgatgatgataataaatgacaataataaacaactatcatttattgagcacataccatataccaggcccagtaccaagcagttcacatatattatacatctaatacccagagcaactctataaggcagctctatatgttgcttccatttgaaagatgaataaactgaggtacagagatgtgaagtaacatgctgatggacacccagatatgatctgcagataagaaggataagtcagaagatcagataagcagaaaggtttaaacacacaggactttcatttagtagtaaactcttatgattggtctaaaattctattttcttttacagtttacctactcatcaaatctgtcttaactatttttgtctctccaaattctcttctgttctttgttactatgtacacatgcttttaaaatatgttaggatttgctgtttccatgtgttaatttcttgtttgcctttcttcatttataaactctttcctcctactaattattgacaaactctatttttctttttttttttgaaaaactctatttttcatatcatttttctaaatttaaaaatagcatataaggctgggcatggtggctcacacctgtaatcccagcactttgggaggctgaggcgggtggatcacctgaggttgggagtttgagaccagcctggccaacatggtgaaaccctgtctcaactaaaattacaaaaaaaaaaagttagccgggcatggtgatgggcacctgtagtcccagctactcaggagattgaggcaggagaatcgcttgaacccgggaggtggaggttgcagtgagccgagatggggccactgcattccaacctgggcaacagagtgagaccctgtctcaaaaaataaagtatatatatatatatatatataaatatttacgtgtgtgtgtgtgtgtgtgtgtgtgtgtgtgtatacatatatatagcatgtgtttattttataaattttgtaaaatacagacatatatgaaaaaattacctataatcttaccatccacaggtgattgctgttagcacctatctgggattttttttttcttttttctttttcttttttttttttttttgcagtcttttctaggcacatatattcaatgaaaaaggttatcaatatagtaacagttattttttattgaatgttaaccatacacataaatatagctttgctttttttttcaattcgcatttaccatgagcagtttcctatatcacaactctttgaaaacattattttcacctttcatggctatataacattctatcatgtgaatttatcaatgtgtattttagaattgttatcagatgattaagcatttttaaaatgttcactcatcaataaaatagtgacaacattcttgaacataagttttttttaccatactatcggatatttccttagtataaattcctccaagtaaaattagtgggccaaaggctttttttttttgaggcggagtttcgctctcgttgcccaggctggagtgcaatggtgtgatctcggttcaccacaacctcctcctcccaggttcaagcaattctcctgcctcagcctcctgagtagctgggattacaggcatgcactaccatgcctggctaattttgtagttttagtagagacagggtttctccatgttggtcaggctggtctcaaactcctgacctcaggtgatctgcatgcctcggcctcccaaagtgctgggattacaggcatgagccactggtcctggaccaaagcctcttgatacattttgctaaactatcagaatgttgggcctctttgcaccctactaacaccctcagtttttatgagtatgattacattattttccctcttttccccaacctcctattctattttccttagataccttaagactgcacccccaacttagctttctgttctcattcaggcagtgtgtccagggcttccaatcccagtggtgagtaggcagatgtgggggcttcctgttgaactctgttaggtaattgagccactcaaggggaaaccagctttggggtccgctctgtggcaagcccaggactctatgaatggagctcattcctcactaatttacacaccaggacaagtagccagctaagaaattgctctaatttcactggacgtcagtcaccagaagaatggagatacagaaggaaaataaaaggcctgctcccacagtggggtcatagcacatctccacatttaacctttgacaaggcaaaagtatttcttctgtccagacaattccagaagtcataaggaatactgggcaaggatgggtcaaaacaacacagactattgagggcaacaaaggaaaaaccatgcactcctgaagaaatcgttcccaaaatgctgaaagagaaagaggattgtctctctagaagtctaatagaaaacagtatctggaacatttcctaggattttttttttttctaatgacttactctcttattaatatgtcagagaaaagaaaagctcctggctaagaaataaaacagtccctcatcccagaaatcacagccaggaatatggattcttaagtgtcaaaaaagtactctgaataaggaaagaaacgcagatgcactacttctattataataagcgcttgatttcttttaatcccctgagtccaattattttcttggcaaatttaagggtactgactgcttctgtgaatctattgttacacttgataatggatctgagttgggggtaatatttgcctatcaatttggatacttaaaaatctctctctctttcttcatataccctctatctcacaactttccatttaatgagggaagtgaatttcttttttctgcccctctttcctactgcttctagaataaaagcataacaggacgacaggagtggagatgagaggaagcatttccaagcaatgggaaagtatgatgagagtcgtgagttggtagaatgggggtgagtaaggggtggggtgtggatggatggaagaggatggaggaggaagcaggtcatatgatcaggcttcaaaggccttccaatatcttgttttcagaggctttgtaggtcttcttacagaactttgagggtatttttcctttgtgagcaaaggagaaccatagtaaattttgagggatgggctgggcgcggtggctcacgcctgtaatcccagcactgtggcaggcagaggcaggtggatcatttgaggtcaggagttcgagaccagcctggccaaaatggtgaaaccccgtctctactgaaaaaacaaaaagttagttggatgtggttgcatgtgcctataactccagctactcgggcagctgaggcagcagacttgctggaacccgggaggcagatgttgcaatgagttgagattgtgccactgcactccagtctgggagacagagtgagactccatctcaaaaaaaaagaaatttttttttttggagggagaaaatatatgattagattgtttttgtgttggtttgcttgtttgtttttttccccaagcaaaaaatcactttactgcaatagggaagacaaataggaaggggaagaaactagagacaggaacagcagtttggaggttctgcaatacagaagcccagatgtttggcttggacttagacactgggaatgaaaaataaatgatgaattaaaaaaataaaatatttgggaggtatacttgacctgaccttggtgctttttcaaatgagaagagaaagatagagacagatgaaaaagttaagcaaggatgactatgatttcccatagtgaatgtctggatgatgatatcattaaatgaaaatttttaaaaaggcagatggtagaaggagatttgaaggaaagacaagaaatttgtttgttttggatttacttgtagaatgacctgcaaaattttgtcctaataaatgttaacaagtggctttccatacaaaaaccaaaccaaacaaaaccctgatgtaaaccaaaaataaaattctgaggccccccttcaccatctgaatgaacttcctcctctgcaagggcactcttaaaatttaacatgaaagactggttcaggtcatgacgggaagtgggggtcggacaggcctcattatgcctctctggcattaacatcaacacagaccttaagtctgttaagaagcatttacaatctattctctctgaagcctgctacctgaaggcttcctctgcacactgagaactttggtctccacaatcctttatcttaagccagacatttcctttctattgatcccaggtctttagataaactcaaccaattgtcaaccagaaaaattttaaatctatctataacctagaagcccccacttcaagttgccctgcctttttgaactgaaccaatgtatttcttaaacttatttgattgaagtctcatatctccctaaaaaccaagctgcaccccaaccaccttgggtgcatgttcttaggatctcctgagggctgtctcctgagggccaagatcactcatatttggctcaccataaatctctaaatattttacagagttttactcttttcatcgacactgatttatattggatttccaatggtgtaatattcatgccgttggccgatttcaagctagctggtagagatatgcaaacaaacaaacaaacaaaaagagatatgcaaaaacaactcttgtgagcttgtgtgctggctccaacacaccatgctgctggatattctaccaggcagcatagggcgcacggtgggtgagcctggcaaggagacaagagctggaggtacagggcttaaatgaagccaagggcgtgaataatattgatgaggagagcaagtagaaatgaaaagagaaaaccagtattaggagatctataaagaaacaatagtcagaaaaagagtggttaaagaggcagaagaatcagaagagaaccagattcatgaaataaaagagaggaatcagtttcaggaaggaaagtgtggtcagtagtgtcaaataccagagactgaatagcctaaggatttaaaagaggtcaacagcaccaccaattaagcggtttttctgagcttaagatatttttctttatttttctatgttaaaaatattttataaagaaaaagaaaaaaagagatcacatttgcccccccaacccgtccctggcctctctctctctaaggaagtcgttaatgaatttgggcagaatagattcagagctgtgagagtgaaaatttgactgcagtgggtgaggtgttaataaaagggagggggtagagatgaaatctttccagcagtttggctcttaaggggatagcttgaaggaaagagggttggaagggtggtttttaaaaagaattatcactcactaatcaactagaaatccagtggaatatgcagtacttgtctgtaatccagcaggctaacttttttttttttttttttttgagacggagtctcgctctgtcacccaggctggagtgcagtggcatgatcttggcttaccgcaacctctgcctcccagttcaagcaattctcttgcctcagcctcccaagtagctggaactacaggcatgcaccaccatgcatggctaaattttttttgaatttttagtagagatgagtttcaccatgttggtcaggctggtctcaaattcctgacctcaagtgatcacccgcctcaacctcccaaagtgctgggattacaggccagagccacagtgcccagccaaggctaacctcttgatcccaatgacaaacagaacaaacatcttactcaagtccagaagcaataataattttgaatcttgcttgcatgtcaacaggagccacattaatacagaagaggatcacattggtccaattaaattgaattgattgagagcctctgcaatacacggtctactgcacaaataatgatggttcctggtacatttttatttgaccattgattgctcgatttgtttctgtgtctaactgtgtattggaattaagctgactcaatttgaactgcaggtccttttatccctcttattttttatttatttatttattttattttaaggcatttctcactctccagaaaatctctaagatttcagctattaggcatttgtctttttttttttttttttttttttttttgagactgagtcttgctgggttgcccaggctggaatgcagtgtcacaatctcggctcatcacaacctccacctccctgattcaagtgattctcctgcctcagactcccgagtagctgtgactataggtgcaaaccaccacgcccagctaatttttgtatttttagtagagacaggttttcactatgttggccaagctggtctcaaactcctaacctcaagtgatctgcccgccttggcctcccaaagtgctgggattataggcatgagccaccgtgccccaccaggtcttcttaatcataacaaattcatcttaaaacatcattttaaaatatattattttttattcttcattgacttcctgcattactctattttttcagagtttctagcaaccagtatcattggtattttaaacaatgtgtacatgtacatttatgcagatgagttaacatatatcaaagcaacctccaaacaatgccatttaggtaatctccaatttaaaagcctcaatagaatgataagattgagcttttctgtagttccatgacctccagcagagtctgcaaggccacagctgcctgaaggttgattctgtaattagaagatgccagggtcatctcagaatagaacctcaagccacccaggctacatttacagaatcagcctctccagaaaaacagcaacaaaggagggccttcctatgtatttggaaggagtcacctagaggagggacttggggttttggtgttggtgtggggggcagggatgggatggggagggggaagcttattgaaatatactaaaagacaaaccaacctaagggctggagggaagaaaattcacacttgtaagcttcttttttaaggggcatctcttaggctctagcttttgagattcagtatatatatatttttgagtcttgctctgctggagtgcagtggtgtgatctgggctcactgcaagttctgcctctcaggttcacaccattcttctgcctcagcctcccgagcagctgggactacaggcgcctgccaccatgcccagctaattttttgtatttttagtagagacggggtttcaccctgttagccaggatggtctcgatctcctgatctcatgatccgcccgcctcggcctcccaaaatgctgggattacaggcgtgagccaccgcgcccggcccagtatttttgttttatgaagatattacatttgtaaagtatgagcttggtgtcagcaaacttatatccctgtgtacaaactggccgaatcacttagccactttgggccaaatcacttagctcttctaacagtaagaaatcaacaagaaaaataaacatttcaaacattacaatgtgttcatgtattcactgtgggggatgaccagattctcgaaaccacaggttgttcttagtgaaacaagtttgggttggggccatagacttgtgtatttagaatcaatggctgttctctctctgggactttgatttttttcttgggctcatcccctttttgtagtatcttatctttgtcttatttgtataggacttaactgttcccattcccttattagagcaatctaagtgattaccttcataccttttggaattatatgcttcaaaattccaaaaagaatgattttgggctgggcacagtggctcacacctataattccagcactttgagaggctgaggtggatcgcctgaggtcaggagtttgagaccaacctggccaacatagtgaaaccccgtctctactaaaaaatataaaaaattagccgggcatggtggcaggtgcctgtaatctcagctactcgggaggtggaggttgcaatgagcccagatcgcaccattgcactccagcctgggcaacaaaaggtgaaactccatctcaattaaaaaaaaaataatgattttggtggtcgacttcaaataggtaggagaagaaggagagaggagatggagggtcagggagatctaattactctctaaaatcatgctaggaaagataacaccttttaataacactctctgcttttataacatcattctgccaaggagctcaaaggtttcaacaaagttcactttcagaaaacccctttgaggaagacagaatatacatcttctctccattttaaagatgaagaaacaggccgggcacaatggctaatgcctgtaatcccagcactttgggaggctgaggccagaggatcgcttgagctccagagtttgagaccagcctggataacatggcaaaaccctgtctctacaaaaaaaatacgaaaattagatgggtgtggtggcatgcacctgtggtcccagctacttgggaggctaaggtgggaggatcgcttgagcccagggagtcaagtctacactgagccatgattggatcactgcactccagcctgggtagacagagcaagaccctgtctcaaaaaaaagaaatgaaagagaaagaaagaaagaggagaggagaggagatgaggggaggggaggggaggagggagggggggaggaaggaaggaaggaaggaaggaaaaaaagatgaaaaaagaaaaaaacaagatgaaacagaggcagaaagactttacgtaaattgctcatcatgtggttgtcaagtttgaccccaaaacccaatttattgaccaaggttattctttgactgaggcaagggggtccgctctcctgggccttgggctttagaaagctcatctctggcctttctgagatccatccctttctttttatttttcttgacacggagtcttgctctgtcactcaggctggagtgcagtggcatgatctcgactcactgtaacctctgcctcccgggttcaagcgattctcctgcctcagcctcctgagataacaggcgctcgccaccacatctggctaatttttgtatttttagtaaagactgggtttcatcatgttggccaggttggtttcgaactcctgacctgaggtgagctgcccaccttggcctcccaaagtgctgggattacaggcatgagccactgcgcccagctcagatccatccctttctaagggcaaacagtccatggtgcaaaggggccatgccacccagagttatgagtacctgggactccagaattccttgcctggtggcctccacatgcacttccagggcctgcttgggcctcttctatgggtctgtcctgagtgttgatagaaccactgatgtgagtacctgggcttgagccgtggcctggagatcctgttgactgtagcatggagggggcttgtgcagctgaatgtctgtatgcaggtggtgggagttctggaatatgatggagctggaggtgggaagagaagtaggcttggggcagctctctcatgccacctcattctggccaaaactcaggtcaaactgtgaagagtctaaatgtgaatctgcccttcaaggtggctacaaaggtatctttgtcaaggtaggagaccttgtggcctccacgtgcacttccagggcctgcttgggcctcttctacgggtctgtcctgagtcttctatgaatctgcccttcagggcagattcatatttagactcttcacagtttgacctgagttttggccagaataaggtgacatttagtttgttggcttgatggatgacttaaatatttagacatatggtgtgtaggcctgcattcctactcttgcctttttttttgcccctccagtgttttgggtagttttgctcccctacagccaaaggcaaacagataagttggaggtctggagtggctacataattttacacgactgcaattctctggctgcacttcacaaatgtatacaaactaaatacaagtcctgtgtttttatcacagggaggctgatcaatataatgaaattaaaagggggctggtccatattgttctgtgtttttgtttgtttgtttctttttttgtttttgtggcctccttcctctcaatttatgaagagaagcagtaagatgttcctctcgggtcctctgagggacctggggagctcaggctgggaatctccaaggcagtaggtcgcctatcaaaaatcaaagtccaggtttgtggggggaaaacaaaagcagcccattacccagaggactgtccgccttcccctcaccccagcctaggcctttgaaaggaaacaaaagacaagacaaaatgattggcgtcctgagggagattcagcctagagctctctctcccccaatccctccctccggctgaggaaactaacaaaggaaaaaaaaattgcggaaagcaggatttagaggaagcaaattccactggtgcccttggctgccgggaacgtggactagagagtctgcggcgcagccccgagcccagcgcttcccgcgcgtcttaggccggcgggcccgggcgggggaaggggacgcagaccgcggaccctaagacacctgctgtaccctccacccccaccccacccacctccccccaactccctagatgtgtcgtgggcggctgaacgtcgcccgtttaaggggcgggccccggctccacgtgctttctgctgagtgactgaactacataaacagaggccgggaacggggcggggaggagggagagcacaggctttgaccgatagtaacctctgcgctcggtgcagccgaatctataaaaggaactagtcccggcaaaaaccccgtaattgcgagcgagagtgagtggggccgggacccgcagagccgagccgacccttctctcccgggctgcggcagggcagggcggggagctccgcgcaccaacagagccggttctcagggcgctttgctccttgttttttccccggttctgttttctccccttctccggaaggcttgtcaaggggtaggagaaagagacgcaaacacaaaagtggaaaacaggtaagaggctctccagtgacttacttgggcgttattgttttgtttcgaggccaaggaggcttcgggaagtgctcggtttcggggactttgatccggagccccacatccccaccacttgcaactcagatgggaccggaggcggtgttaaatggggagacgatgtcctagtacgagctctggtgaccccaggactctgcgctgctgcgcttggggcttgcccgacggtggagaccggggagcatctctgggcgtggagacccgggcgcagtaccccgggctcagaggggtcgggggttcccgggcgtgctgagggcgctgctgccgggtggggagagctgcaggtccggcaccgagcgctgctttgttcggagggccctgagctggctagaaacccttctggttgcaggtcggccagtacctacggagacaaatgccagcactgagtcttcactcggttcttaagaagctggtctgttctgacctgggaattggctatatgctccccgggactggagcggcacagtcccggactgtgaatccgggaactcgagttggaggtgtcccaaacggtccgtggtgctattgctcactagaggccttgggtctttgtttgacctgaggggtagggaggtcctgcctacagtctccgtgcgctcagctgagctggtgtccctggcgcagagcgcggacgagttttgtttccttttctttttcttttttttctttcctttaagtctcggtctgtcgcccaggctggagtgcaatggaacgatctccgctcactgcaacctccgcctcccgggttcaagcgattctcctgcctcagcctcctgagtagctgggattacaggcgcgtcaccacatccagctaatttttgtatttttagtagagacggggtttcaacttgttggccaggctggtctcgaaccctcgacctcaggtgatccaccggcctcggcctccccaagtgctgggattataggcgtgagccaccgcgcgcggccgagttttgtttcttttaaaaacaagacttaggagagcctgcggagacccggaggtggggtgcccaatcctccctctcccacgttccctgcagccccatcttccagaccgttgctgctggtctctcggggcagcttctgcctgggcgcagatggggaagctgggccgaggtggtgccgtggaatgaccgggagtaaccccggcgggcggcgcagaactcggagctccgccgcggggctgggctgggctctgccgtgagggtgggggtgctgggcgcgcgggctgcggtggcccccggagactggcccgcagcgcctcctggccggaggacctaggaatcggccggctctactaggtgtctttgctcgcggttccgactgtgaatccggtgaagaccggtggttgcagacggggaggaactatgaggttgaggcgaaagcccgttttgtttttttttttttgtttttttggtttttttttttgttagcgtgtttgccaactcccaggccattggtaaagcaggaaggttcttggggcggcggacggtgccagggttatgtgtaggtgcctctttaggtatatcttttatcaaaaagaagcaaagaaataagattaaaaataaacaaagaaaaaagttgtctggcactggcagtaattggcctgcctttgcagcactgataccattagcttttaaaatccgacttttcattgacacttcaagaagagaatgggtagtatatacacattcatctcatagtggacaaatttcatatttaaaaaaaccttctgggtactgaaatcagcaagtcacttgccctccatggccgaatccctgcttcccacgaagagaacctcacaaaaatttcccccaagttaaagagtggaattttcttgatttttttttcttttttttttaacggccgtagtttagaacccagacttaaattatgatcttcttttcaaacaaaacttaaagtccttaagttttcatctccccttttatttcaacctattcttctcatacctaccacaaaaataatggaggctttctgttgagaaactttccgtttctgttgagagtatcattctcttgagaaactttctcctaaatcagagaaagtatggaagcatggaaagtattcctgagtagaacctctacagatattacaatatttttcaaatacaaagtttccattgtcagcctgtttcccaagtgcttccacaaaccattaaataattccacaaaccattaaaataattaatgctagggaattttaggaaaacattggtttacaatcagaaggaccggggaagtgggtcttcagccttcacgatgactacaagccatttaagggactagaattgctactgttgtcagagcaatttaggagtctgtatttgagcacccgcatagtgttccagaatgacatatctgactgtaacctggacacgtgtgatatgttgtctcccctgcagatgagcatttgaaatctcaaccctcgtatttctacgagtgcaggcctataatggaccctgggcacattttttttttttttgagatgcagtctcgctctgtttcccaggctggagtgcagtggcacgatatggctcactgcaacctccacctcctgggttcaagagattctcctgcctcagcctcctgagtagctgggactataggcgcacgccaccatgcctggctagtttttgcattttcagtagagacagagtttcaccatgttggccaggatggtctcgatttcctgacctcttgatccacccgcctcggcctcccaaagtgctgggattacaggcgtgaggcaccgcgcccgacccctggacacattttgacttagaacatattttcggtttgtgtgagacagtgcattagtgcaggattggaaaagagtgatcaggaattgattgttttcaaggattggttccttctgctcaaggaagtcccattgtaaacataaaaaaatgaatgaaactgaagaagttcagtgacttagctttttattatcttctgtagtacttacctttttggagaggagttggttgggatatttttccatttaaattttttttttaaagggatcttctctcccgtaagccgggatacttaagctatatatgtagtggctacaaattaaggtcttcactgttttcatttttagctgctagaataagtgaacattaccttagatagactcttctaattatgaagatatctagatgtctagaaaatatcaaaatgcatgtggtttttgcatttctaaaatacttttaaaaccaaatactttttcttttttttttttttctgagatggagtcttgctcttttgcctaggctggagcgcagtagaatgatcttggctcactgcaacttccgcctctcaggttcaggtgattctcctgcctcaacctcctgagtagctgggattacaggtgcgtgccaccacacccggctagtttttgtgtttttagtagggacagggtttcaccatgttggccaggctggtctcaagctcctgacctcaagtgatctgccagcctcagcctcccaaagtgctgggattacaggcatgagccaccacacctggcctcaaatacatttttttaagtatccagatattaaataaataataccattatagtagttgttatggtcatttactctagcatcaaatgttaaaagatcattctgaacacttgttttgtttatgctgagagaaggcctactccaaaaaatgcaaccatcttcgtatctgcatgtggatacaaccatgaatggccaaagttattgcagtgttgaatagacacttatatagcactgtgtggcaagtactgtttgaaatgtttttcacgtgtttattcattgtatttattttgagatagggtcttgctctgttgcacagggtggagtgcagctgcacagacaaggctcactgcaacctcagcctcctgcgctcacgtgatcctcatacatcagcctcttaaggagctggggccacaggcacgcaccactgctcctggctaaatttttacaattttttgtaaagacaaggtctcactatcttgctcagactggtcttgaactcctgggctcaagtgatcctcccacatcagcctcccaaagtgctgggattacaggcataagccactgtgcaggtcatcaaatgctaattgaattttcacaacaaaaccatttattgtccctagtttacaagattaagtaaatgagaagctaatttttctctggctatataccttgcaagaggcagagctaagacttgaacccagccagagttctttaactccagcactaacatttcagctgctgcaaccagggagcttttcaaggatgatcaccacattctctacattcatctgctataatccttatcagaatctacagcctgtatcatattttccttgttgctgtgagtgggtcagccaaattctctttaacttgaaaccttggttgcgtagggattgcaacatcctggaaagaatagaataaaatttactcaactcaattttttacttggttcataatgaaaactatactattgcttcagtcagatgtttgcgaatagctgtgtgatctcaaaatgttttcctatgtgatctatagaaaatggaatgatagagtattaggctgtaagggcctaagaaacaaaggaaaaagagaagtgaactgttagtttagttgtaaaacctaactttggtgaattgtaaaaatttgttataatacaatatgattcttgcttgtcctgtccttgatgaagttgtggaccttttgaaataagctatttctctgttactgctgttactgtttagaaatcaaatttagttttttcttaagatatacgtatttttggaagataaacacagtttcaaagtctgccttgttggctgggtgcactggctcattgttgtattcccagcactttgggaggccaaagcaggaggatcacttgaggtcaggagttcaagaccagcctggcaaatatggtgaaaccccgtctctactaacaatacaaaaattagctgggcgtggtggtgggtgcttgtaatcccagctactgggattgggaggctgaagtagaagaattgcttgaacctgggaggcggaggttgcactgagtcgagatcgtgccactttactccaacctgggcgacagagtgagactccgtcttgaaaaaaaatgtctgccttgtaaaagtgaaataggatgagaaagtgcctttcttattaattggtgtaatgaattagaaataaactctttgaagacacctcttggtaaaaatagttacatttactgttgatttatggtatgttggatatgtttttaagttttccgtgtaataactcagttcattctcatgagtgaaataggtgcttttattgtctttatagatgggaaactgaggtataggcaggctaggtacattattatggagttcgtaagtagtggagctgaagtcgcatcccagacagtttggcttccgtgagtttaccaatctcatggtaaagactttgtcagactatcaaagttttgacaaatgaaatattagcaaaaggccaaaagggattctctattttcatttgagtatcttcacctgaaaatagttgcctgaataagtagcctgcatagaaaggtacattttagaaatacttgaggccagagaatgaaaagcttacataaaattgatttccggtggggccttcagttactctccattctacgaagaccacaaatagcattcaggcaaagagcatttattccaacaatggaggagcactggatttggttcctaaaacaaaataaagtttgaaatcctgtctttcccatgttgaaaacaaagttggtacaaaaccctttagcttttgcaaacctcctttaagacccgatttaaatgcttccctcctcatgaagctcttctggatccactccttcccatcactaagttgaaagtaagatccccttctctttacttccattagacttggattacagcactctttgtatcatgtatttaattctgttttttaattacagttaacatttatttgtcttcctcttgagtgtatgcttctctagaggaaggtctttgattcattctcccctggccttaattcatcccacttaatatggaaaaaatttaataaatgctgacttgaataagtccaacaaggagaatgggaagctcatgtttgcttcctgtcttctaaaagactacttaagataacagggtaatcacagaaaagcattagaaatagagttatatgagaaacaactgtagttaaggctaggtttatgttagactgagaaattttagtgcatacttaagttatttaggccaggttactttttgtagaacaaacatttcagtttcgctcagtttcatttccgtttctgaggcagctgtgatttaagaaaatgctctagtctgtggcattccatattcaagtactttgagttgtatattaatttatttttgttaataagagtgacatgactcactaagtaatttagagatttaaacacttttttaaaaaacagtaacttcatatgcattggatctattcttctataaagtcttttcttggggggtgtttgtttaaaattccccggtgttttctctgccaaatccaacttccaagaagcatttggaagtcaaaacattttatctggttagtcttaaagtccagatattttgtgatagctggtatttagtttatgatatttcccaggaagaactttttagtagttgaaccatttatgaaagacttccttgaagctaccttagagagttgatttagttcttctaaataagtaaatagaatattagtattaggacatcttggagtatagatgcaaatattggtgaaaaagaacatggatatcagagtcaaattaatgtagattggaattctggttattactaatggatatctgacattaggcaagttgctgatcactctttgcctcagtttcatcatctgtaaaataggtatttgtgtttgtgtataatgtgaaccgtataatataatgcttggcctatagtgaaatttattcatacgagtgttttcagtgattttaaaagcttgctttaggccgggcgcgatggcttctgcctataattccagcactttgggaggccaaggtgggcggatcatgaggtcaggagttcgagaccagcctgaccagcatggtgaaaccccgtctctactaaaaatacaaaaattagctgggcgtggtggtgcaagcctgtaatcccagctactcaggaggcttaggcagaagaatcgcttgaacccaggaggcagagattgcagtgagccgagatggtgccactgcacagagcgagactccatctcaaaaaaacaaaacaaaacaaaacaaaaatcttgctttatagtttacttccacatcaaattgtctttatcccatgttacttgcattgatatcccagacatgaaaagaaaaaaagatgataacaatgacagttattaaattaggttccactcttattctagatcaccaattcatattactattcagacttggaacattaaattttagttaaactttttttcaaatatgcatataattgtcagtggttactatattttggggaagagattgttgacttctttgaagaaagatacggattttctcttcagaaaaaatacacatgggctcatataatccaaattttatgtgtaattacagggtgttcatgaatgcccacaaatccattaagccatgtgaccttggacaagtcattttacttttctgttttttaggttgttggtctgtaaaatgatactacttgacttttaaagagcccttcaagctcttatgtcctctaaccccaggtctgtattcagaagaaggggtggtcctttaattagagccatctagagatctgaggaacatgctgggcattagtgtaacataccatgtggattttgagaggtaaagaaaaaataaccagggaatgcctcagagcattcctgatcagatcgatgacagaagaaaggaatgagagggaggagaggaagctgttgaaatttcctatttacctgctttgagtgaatgaagatttgaatcatagaaccagaaggggttctcatctgaaatgcaaaggaaggaggagttggtttaattcaataagtttcagttgagtaaacatgatttagtgagatactgttcttgcttctgactcaccatttggaaaatctctctaaaataaaattggactctccatctcggacatcattttgggtgtaggttttgcttttttttttgagatggagtctcgttatgttgcccaggctggagtgcagtggcgcaatctcggctcactgcaacttccgcctcccagattcaagcagttctcctgcctcaacctcctgagtagctgggactacaggcgtatgccaccatgtccggctaatttttgtatttttttaatagagacggggttttactatggtggctaggctggtctttaactcctgaccttgtgatctgcccaccttggcttcccagagtgctgggattacagatgtgagccacagtgcccggcctaagttttacttcttataatggactcctgttaagccaataggtgatgaaaggaaaccataaccaactcttcaggctcattcatccttcaagaatagcatgctagtacccatcctaggaggagaattggactatacctcatgaggatagtttgaagtatctcagaagaccctcactgggggtaggtcggtaagacacaaagctttctaaagcactgtaccaaatttgttgtttgagagatcataacaaattagaagtggaaagaagaaggagtaaaaggaagaagaggtttctggccaggagcagggagggggaaggagctgctaggaagatgtttggttgtcatatccctgttcacccttgctttgcaaaattcttgtaggatgccaggttgggagtaattgtttttcacaagagtcaaaccacgcttgttttcttgaagaagcaagtctttggagggtggtggcttgaaatctgttggatctggtatttaggtgatacactttgacataaaggcaacactgatgcaagcagcagctttccttggaaaggcagggagaaagtgaaggcccagactgatgagcttacactgacctgcagacccttctccattcccaggcatgtttggtggcagagtttaccttagttggggttaggctgttgtctggtactgtgagagagaaggaagaagaagatatgatattaacaacaacaatacatatttatatttgaaaattaaatgcactaatacacctatagtgctattaaacaaatttatttgttcagcaaatgtttgttaaacaccatgtactgtggaaagtactaggtgctggacagaggtcaaaagacttttaagaatctgccaccattaatgatctctttctgcttggcattcaaggctctttgaaataagactgtgacccactttgatagttttgtcctggattataagacacatgctcgaaggaactatagctggttttctcaccagactgattaacatatagtatggtttggtacctgttaaatgagtctctctctacaggttttcatcttctactttaagaaccccttcctggcattgtttggctcctcattgttctggaatctcatgtccatctcatgtatttgccttggttcacacttgatcttctgctcatattcctcacctactgaaattttacccatcaaccagaccgtgggtgatggaacacagcatgggctagttcttcttatatatgatctcatttaattttcactggaactctgagataggtagcatttcagcccactcaagttgactcaaatttttgtaatcatcaatatattttaaaataactttatatttgacctgtaattggaaaaccaatatgagttatcataaatgaaaggtaattttaaaaataattaggatgaagacaaattatttttctcacagtctatgtataagataaactattggttcccaaaggccccagctgacaatgagacttctcttactttgttgaaaagggaattagcaagcattaaagaggtgtcaaaaagaagactaaacaaaagcttactcctttttttttttgagacgagtcttgctctgttgcccaggctggagtgcagtggcaccacctcggctcactgcaacctcttcctcctgggttcaagcgattctcctgcctcagcctccctagtagctgggattacaggtgcatgccaccacacccggctaatttttgtatttttagcagagatggggttcgtcatgttggccaggctggtctccaactcctgacctcaggtgatccacccacctcggcctcccaaagtgctagaatcacaggtgtgagccgccgcacccggccgcttactccttaatgtactaagaatgttatatataggctgaagaagtgctgaaaagaaccatattttctcatgatgtggttcaatgtttaatactgtgcttgttcatctcctaaaatcctctgaatatcacttaaattcatcctgtgtaactctcccacatttggggaaatactgagcttgcctattattatattagccccatatttcagatgatgcacctgagccgaggagaagttaaataacttgttcatggttccatatttggctaatggcagagccagggattcaaactcttgtctctctgactcccaggtttgtgcttttcccacttggctgaatttctcatgctacctcctccataacacctttcctagaacttttaaggaatgcttcccctgttctctcatagcattttaatgtaagttgccaaagtgtcccagtttgcacccctaccagcaatgtgggagaaaatagcaacatatttttgatgttggggtctagtgttacggtttcttctgctctttgggatgtatattccatggctactgaatacccaagtcccaaacagttttcttagactcagaaggtcatccacttcagcttcttcatcaaaaagacatattttctggctgggcacggtggctcacacctgtaatcacagcactttgggaggtggaggcaggagaattgcttgaacccaggaggctgaagttgcagtgagcccagatcgtgccactgccctccagcctgggtgacagagcgaaactctgtgtcaagaaacaaaaaaaaggacttgttttctgttccattacccacagtggtagaatggcgtgctaaatttattctccagctgccattaactgcaaattaaaatcttagtctcttgcctctttaatccaggcttcttcatactataccagaatttaggataactattacagtgccctttataggagagaaagaagaaattgtgtctgtagatgtctgttcctttcagcttaaaatggacactgaaatgttaaatattggactggcctcatttatttctcctgtctgttggtccaatttgaatcttaaggcgtctttcaactggaattttttgtttctctcaactaaaaattgttctttgtaagtttgaatcagaacaaaatcctgaatgttgagggtttcctaaaggctgtttctttatgcaaaagcctgaaacccgatgttgatgttggctgcttaaaattaactgtgaatcaaggcagggtttttatttttattttttttttactttaatgattgtgttaattatagtgaaaaccttgagttcacgagaaagaaagcctttggtcaagtattgtttattaagttgtcagtcttgttgcaggatttgcaaatttagtggaattagtgccatttttcagtttacaattccagtcacatttcacatgatcagagcatggctttcttctctgtggagcaaatagagggctgtctgacacttggttccagtggcttccattaagcagagtggatatgtccctggagtctgcagagaagggcatggcactctgaccccagatggcactccgttttgggacattgtccaattctagttcatagcatatgtgaccaacaccagctctcacctgatgtaaacacttagcgcgttgttgcttgggggattggattgtgtgaatttttcaaaactacagttgacagaaggaggctaccaaaaatgaaacccaataattccatttttgggaattattcccacttttgttccatttttcccactttgttctttggcacacagaatgtttgatttgtgaaaatcttaataacagtagttttttctataaggaacactcagaatcttgataatattggaataatacagatccttttgtaggatcctctcagacctcatataatagagttcatgtagtcaatatttaaagaaaaacacccttaagtttttgtttttcagaatcacaagtaagtggatttaaacttgtgatcttattcccctttcttctcttaatttagtgaggcagccagcgagagggtttgttttggttattctaaagaaggagtttgcttgtaagttttggagggcaagacttagactctgtgtctctgtgcttgccctggaactttgattaaattgtcactaaccgagttagctggccctcgccgggctgcagaaatagaagtgtcttgcacacatgacatatgactgtctcaagagctggctggtgaaaggacgttctggagaaggctgccgatactgtatgaactagaactggacaagagcctggagattggataactcagtttggcgcaagtaaagggaataaaagtgttaaggtggcaaaattgtatccaggtgtttataggctccctgagttcctgacttgagcctatctatgggtttagagttcaaggctctttaccagtgctgacaatcttatactctaggttgaacctccggggaaggtgcccttgcttgatggcatgtttaccaggggttctagagcctcaatcacagattctctctagctcacatgaagttaatgaaaatgaatgtgcttccctacaaattagagaggctttgaggaaaaatcagattaaatgcactcctgcttgaacttatgtttcttagaacacagctggaaattttgtcacacaaacctttactttcagtgacatttcttgactggtttgttactgtagtgaatctgctttaactatcttttcttatcgctgaggttttacttccattctacatgtgattgtggagcgctgcgtcattgtgggttcagtgtagtggagagtaggaagatggtgagacacagtagcttgttgcacattgcttaatttatcagggatcactgatgagttagtacactagagaagattgtaggtagagctgaaaagatggaggaattataaggctcagatttctctctttttttttttttttaagatggagtttcactcttgttgtccaggctggaattcaatggcatgatctcggctcactgcaacctctgcctcccgggttcaagtgagacttgatggtctcacttgatggtttcctggctcagcctcctgagtagctgagattacaggcacccactaccatgcccagctacttttttgtatttttagtggagatggggttttatcatgttgaccaggctggtctcgaacttctgacctcaggtgatcacctgcctcagcctcccaaagtgcagggattacaggcatgagccactgcgtctggccaaggctcagatttctaatagagatttctaatggacatagaggctggaggaaatgggatggacaggaaaactgagtcaggtgccaaaaacttgtagggggccgggtgcggtggctcacgcctgtaatcccagcactttgggaggctgaggcgggtggatcacgaggtcaggagatcgagaccatcctggctaacacggcgaaaccccgtctctactaaaaatacaaaaaattagccgggcgtgttggcaggcggctgtcggtagtcccagctactcgggaggctgaggcaggagaatggcgtgaagccgggaggcggagcttgcagtgagccgagatcgcgccactgcactccagcctgggcgacagagccagactccatctaaataaataaatagataaataaataaaataaaataaaaacttgtagggaggtggcagtgtgctatggaggataggtgcaacctctgtgagaatgtagagaaaatagtataagtgagtggtgaggacccccaagagggggttttatagtaaaacaatggtcagaagtggcaacaggataccgtataatgctttcacctctaccaatgcactgggtactggagagcgctccagtttgctctggaaaggccctttctgtggacaaagaatacagaaaagagattcctttaataaaccacccactctgtgtcccacccttgatgaatacttcactgtgaaattgccagaattaatcatggtaatagctactgtacacttactttgttccaggaactggataaatgttttacatacattatcagttctattttttggagaagatacaggggctcagagtccctagggttccagagctggtgagtagcagagtcaggattcaaacccagctttctctgactctaaaacctcctttcttcctgctgaaacaattaactcaagacaacaaaggagttaaggatttggggagttttctgcatggtagaatagacccaaaggaaaagaaagaaagacagtgactaagatttgggtttgtctgccccaccaaatgctttgagcactttcataaatataaatccttcaggttgggagaaggttgaacatctgaagacactgattcttcagagatgtaatccaaacaaagtgatctttggtgatatggtcactaaaccatttatcccaaaattctcttggaaaaccgtcctataacagcagggaacattatccagccaagtttttctgcaaataaagggttgctgatagaggcttgcctgcttgtgtttctgtagctcagggtgtttatgaattcactaatcccttcccttcagatcccttttattctggtgttatgattgtgactgaaaaaaattgattttttttctatgacatagaatgttgaaaggttgatttcttttctagaggaaagattctttttttctatgtgctacataccccccgaccagggaaaaggcaaatagtggtattgtttgctgaagtcttcctttgaaggttgcttggtgtttgcttagtggaaatcagcaggggaagagaggctatctctaacattttgttagagtttcttcgtagttctatagtgatgaaacaaggacttggggtacaggacagatctgctttcagaaatcctggctcttgtgaggtttagaagccctgagaccatttagctggtggcaacgggaatgttgagggtgataaataggatctttggttgtccaagtatcagtgacatgatatagatggagttaaacctttaggatctccttatttatttgtttgtttatttttgagacagggtcttgcactgtagcccaggttggagtatggtggcatgatcataactcactgcagcctcaaactcctgggctcaagcgatcctgctgcctcagcctcccaaggtgttaggattacaggcatgagccgccacacccggtcaggatctcctgtaaaattatattgttgacaacatgaagaattatgcttctcaaaagctagttatagatttgtacaatattcatagatttcttgtttcagtttttacaaattcatagcccttattttgaaaattagctattagcaataattttgtctaggaaattggatgtgtattcaagtgaaagaaggaagtacagttacctattatcttattgtaactaacaatcaagtaagtgtgatgcatttggtactttaaaaactgcacccaagttacagattattggaattaataaaattcactggatctatatatttttaaacggacagtgtgatagcagaacctcttatagaatgatagaattcctctggaatgattggataacttcatttcatccttgacttttaccttggaggatttcttaccccttttggcttctcaaatttgactattaaaatgttgcctttaaaaataggaacacagtttcaggggggagtaccagcccatgacccttctgcaaggccccctaactcaaggtagtttccctggaactgtggtttatggaatgtttcaggagtgtgaggaggtataatttaaggctgtcctagcaaggatacccttaaggatagagggcccagtagcatctggaggccagaaaagttaaactgaggcagtcagattagcttcaggctcaattaagctgatgggtcagcctgggagaaattgcaggatgactctcaatatcccctcccacccccacagcagccacgatctgtctgtctttaatcatgggtgcagtgaacctgttctttccaggtgtcttggccttcagtaaccttgttaggcttgtccctgaacgtggctaccgatccaaagacacatgatcagagaggcaattagagaacagaccttttccaaagcaagcatgttctgttgggcttagaagtttcatgtcctaatattataggaccctgtgcatctctctggagatgaggcacatgagtcatatctgtgattcttgcttttgtgtcaacatctcatgaataggcaatcagagctttggcaccaatgtattttcagttcatatctgatgtagttaaatccacctcctgctttgtagtttactggcaagctgtttttgatataagacatctagaacactgtaaatatataacatttttatttgtctattatacctcaattacgaaaaagacatctagaagcaacctcatcaagagagatactgaggccgggcatggtagctcacacttgcaatcccattactttgggaggctgaggcaggtagatcacttgaggtcaagagtttgaaaccagcctggccaacatgttgaaaccctgtctctattaaaaatacaaaaaagttagctgggcttggtggtgggcacctgtaatcccagctactccggaggctgaggcaggagaatcacttgaacctgggaggcagaggttgcagtgagctgagatcacaccactgcactccaacctgggcaccagagtgagattacatctaaaaaataaaataaagtaataaaaaagagagatattgatagctgttgttggaaatttcaacttccatctcacttctggtaactttttggaagtttgttgaacaaagtggaatacacgcacatacacacacacacatactctcttgtttgtttaaggtttaatgaaatagctgtcatataatcactgtttttgaaagaggagaattagttgctatctgtacattttgggtatgtgaactatttggatagaactctgagaaatgcattcagaacaacaaacaaaatcataggagaaatagctaagtgggaaggggcatataagagttgttgaaaaagttatttcttgagaaaccagctctaatgctaggcaagtcacttgctttgggggaggcctcagcttctctgtctataagattgcagcaggggtgtagtgggaatgagtcttcaacattccaagagattttatctactaatacgacagtcaaatggagcatgactttgtggaagcctctcctcttccacccagaggggccaatttctctgtcccagtgagatgttgacacttgtatgatccctgcttggagacttccctcttctggaacctgccctggctcaggcatgagggctgactgtcacccttcgataggagcccagcactaaagctcatgtgttggcagtgttcttgcgggaaggaaaaagaccagccagcccatttgttactgcacaagcaaacagcttctggtagctgtacagatacatgcactttctttcctcactgtgtttccatagacagatttagtgctgtagaagagtagagggcagtcacgggaaggagttcctgtttttcttttggctatgccaaatggggaaaaatcctcctatcttgtctttttagtgtcatcctctctccccttttcttcttctttataattctcatctctcatctctcctggaaatgtgcatgtcaagttcaaaagggcacaatgttttggtgaggaagaggtgggagaacacgtgccaggtgctaactagggtcatcatttcccccttcacagccagcttcctgtgaatgtgtgtgtgtgtgtgtgtgtgtgtgtgtgtgtgtgtgtgtgtgtgtatttcttttgccagcatcactgaatctgtctgctgtctggtattccaggttttggtttagggaaaagtaaaagtaattttataatcccagctgtcatttaagccacccctttgtgggtagcatatggtccactctctcagttcattgtcctaaagatgcttcatcagaaaggaataacttccaccccgttactctctgtccccttactctgctttatttttcttcgtcaatcctaccaccaccacccactgtttgaacaacccactattatttgtctgtttcccatccctggtagaataggagccccatgaatgaaggaactttgcttctgttgttcaccactgaatctctaaggtatggaacacacctggcatgtgataggcactcgataaatatttgttgtggctcatgggcaccttgcagagttaaggctgcagttgtttgtggaatttataagtggtaatgaatatttatctactattcctcttccaaggcgatcacacaataatcaggctttacactatccagttcttaggtcttccaagttatgacttgtgaggtatgttaattatgataatagaaggcagtttatttggttcagatttattgatgtgtaatttaccacagtaagacttcccctttacaaaagtatgatgagttttgacaaatggatacacatgtgtatctaccactgccatgctccttttcagtctgtcgtcccctccacccatgaccactggtcaccactgcagtgatttctgtccccttcatttcaccttttccagaatgtcatataaatggaatcatgcagtatgtagttttttgtgtctggcttatttttcttagcattaggcttttgggattcatccaggttgtcgcatgtaacagtagcttattcctttttatggctgagtaagtgtcccagttttatttatatatttatttatgaggaggtgtctcactctgtcacccaggctggagtgcggtagcgcgatctcagctcactgcaacctccgcctcccaggttcaagcaattctcctgcctcctgagtagctgggattacaggcacccaccgccacgcccaactaatttttatatttttagtagagatggggtttcaccatgttggccaggctgatctcaaactcttgacctcaggtgatccgcccacctctggctcccaaagtgctaggattacaggcatgagccactgtgcccagccccagttttatttattcaccagttgatggtcttttcgacaactaattgtttccagtttttggctattctgtataaggcttctataaatattcacaaatacctaggatgggatgactgggtcatataatagtactgtataaccttagcagaaactgtcaaactattttccaaagtggctcttccattttacaattccacagtgtattgagtcccagtgtctccatacacatgctagcacttttaatatttaatttagtgggtatgtaatgatatctcattgtggttttaatttgcatttctctgcagctaatgatgagtgtttctgcttatttgggaaggttttaatttagcagtctgttgtattctgtagatattaataacttcaaaatatcagtggcatttgcagttaaaatttccttaaaaaattggccaaaggtttccagcagtcacttctgccatgcccaaactgtatgaaacaaggctgaggtgtggagattgtcacattttggcaaggagtgatccacttgggtgactgatgagacccagagagcgtacgcctcgggcttgagggtgaggacgggcgggaagtcgactgcatggccctgctggccttgggaggctgcccagtccttagctaaagctggcagttatgggaaacagacttagattctattacgtttttcaggatgtcccaggagtcacctgggaagctcagcagtcctttgtgactttcaagcatatggtagaagctgctgaacacagagctccctctttggggataatttgcccaaatcatttaatcaggcttgagaaatgagttaccacaggtccaggagtgctgccacccttgaattctgacaccctatttctcctatccgtctcttaattaattaagcagacatccccaagtgcttacgacaagccaggacccttttgcatactaaggaaaacagggatgaaggaaacagaaatggtctctgctctgactcagaaggtagaaatcctctttcccagccaagtcttcctagggagcacgtaggaagggctctgaacccacgtgtcagttgcaggggaggatatcaggaaaggacattgaagaagtggagacctaagtttgagacctaggcattagccaggctagcagtgcttgaaaaagtgtcttaggacaagagaactcaccagtgaagtcccagtggtaggagagcgtgcagcatattctgagcctgtatacacatctccagggcattgcttagcaggtggggagtggcaagagagtaggctggagtcacagaagggaggccaggtagaccttggtgagcactggactctatgttcaggtgctgaggagctggcaaaaggttttaagtcggggagaggcatgttcagatatttggtctagctgagtaactttgggtgctctgtgacaaatggttgggagaccagtgaggtggcagttgcggtcatctaggagcaggatcagagtggcctattgactgggatgactgtgaagtgggatcctttccagccagtaactggaaatgtgtatgagggcagaagtgagtgtactgcatttgaaacattgagaaatctagtacatagtactgtctcttttatatcttttttttttttttttttgattttggtttgtttgttcactaacttggaaaactgatgtggaaatgtccctttggcttcagttacctgagcagaaggggccgggcattgccaaactctcctcttaggacagaattgctcccagtattgatcattgtgttctgagttgggggagcaaattgtgcaggaggccaggtcagtgccaaggtgggtgggaggaattggagcaggaagcttgcctaagtgtgcccagcaaagccacggtagaactttctactgtggctctatgctacttcttagcaaccttctccatgtgcttcctggagagtccttggagtcagaacctttttcttgaaacccagacactttacttccaagaaaatgctgtccaagaaaactcatccttcccttcttctcatgaacgttgtgtagaggtgtgtcttctcttcctttgagcttttccactcagggtttaggggaggtgatattctatatttgggtttggctctgggtactgcaacactaggctattaagatttcatccttactgctttgcccctcctatctttccagaaacccacaatggatttgctagaaataatggaacgtcctgtttggacaggatataaccatttctcagctagaggatattgttggaatgaagaaagataaatggggagaagggaactcacattgctttggcacttaaattaagccatgtactgtgttgggaaattatttatattatctcgttgaatccacagtagaacacagttgaacaccatacaaggtaagtattgtcatccttattttaccatgaggaaattgatgcttagagagcataaagccttggccaggggcacatagttgggaagccggggctaattcatgcctgggctctttctgatagttttccttttttaattgtcccctcctcattgttaccttggggatttcaagagattcatgtagcttctaaatcaacgaactgattcctggagagcagcttctgtatgagaaaaatctagctaattatttatttcagtgtctctggaatgcaagctctgtcctgagccacttagaaaacaatttgggatgacaagcatgtgtctcacaatgctgctctggttgccagtgctgtgctgccagttgtcatctttgaacaaactgatgcagtgctggtttaactcttcctctttttggagtaagaaactttggaggcctgtgtccttctagaagtttgctgagcaaatggtaaggaaaagaaataggtcctaaggcttgactatttcagagaatttcttgatttattggactgtcaatgaatgaattggaatacatagtggtaggctgtcttttcttctcagacactgcaatttcctccaatctcttgacttttctagaagttttaatccaagtccttgttgggtggtagataaaagggtattgttctactagagactgaccttggcatggagatctcatttggactcacagatttctagtctagcgcttggttttgtatccatacctcgctactgcattcttagttccttctgctccttgttcctcatgcccagtgtcccaccctacccttgcccctactcctctagaggccacagtgattcactgagccatttcataagcacagctaggagagttcatggctaccaagtgccagcagggccgaattttcacctgtgtgtcctcccttccatttttcatcttctgccccctccccagctttaactttaatataactacttgggactattccagcattaaataagggtaactgctggatgggtggctgggatacacagaatgtagtatcccttgttcacgagaagaccttcttgccctagcatggcaaacagtcctccaaggaggcacctgtgacacccaacggagtaggggggcggtgtgttcaggtgcaggtggaacaaggccagaagtgtgcatatgtgctgaccatgggagcttgtttgtcggtttcacagttgatgccctgagcctgccatagcagacttgtttctccatgggatgctgttttctttccagagacacagcgctagggttgtcctcattacctgagagccaggtgtcggtagcattttcttggtgtttactcacactcatctaaggcacgttgtggttttccagattaggaaactgctttattgatggtgctttttttttttttttttgagacagagtctcgctctgtcgccatgctggagtgtagtggcacaatcttggctcactgcacctccgcctgccaggttcagcgattctcctgcctcagcctcccaagtagctgggactacaggtgcctgccaccatgcccagctaatttttgtatttttagtagagacggggtttcaccgtattggctaggatggtctcgatttcttgacctcgtgatccgcctgcctcggcctcccaaagtgctgggattataggcttgagccaccacgcctggccgatggtgctttttatcatttgaaggactcagttgtataacccactgaaaattagtatgtaaggaagttcagggaatagtataagtcactccaggcttgaggcaaaatttacaaatgctgctgactttgtatgtaaggggaggcattttcttagaaaagagaggtaggtctctgggattccagtatgccatttccatcctcagtgtttttggccacctgagagaggtctattttcagaaatgcattcttcattcccagatgataacatctatagaactaaaatgattaggaccataacacgtagctcctagcctgctgtcggaacacctcccgagtccctctttgtgggtgaacccagaggctgggagctggtgactcatgatccattgagaagcagtcatgatgcagagctgtgtgttggaggtctcagctgagagggctggattagcagtcctcattggtgtatggctttgcagcaataactgatggctgtttcccctcctgctttatctttcagttaatgaccagccacggcgtccctgctgtgagctctggccgctgccttccagggctcccgagccacacgctgggggtgctggctgagggaacatggcttgttggcctcagctgaggttgctgctgtggaagaacctcactttcagaagaagacaaacagtaagcttgggtttttcagcagcggggggttctctcattttttctttgtggttttgagttggggattggaggagggagggagggaaggaagctgtgttggttttcacacagggattgatggaatctggctcttatggacacaggactgtgtggtccggatatggcatgtggcttatcatagagggcagatttgcagccaggtagaaatagtagctttggtttgtgctactgcccaggcatgagttctgatccctaggacctggctccgaatcgcccctgagcaccccactttttccttttgctgcagccctgggagccacctggctctccaaaagcccctaatgggcccctgtatttctggaagctgtgggtgaagtgagttagtggccccactcttagagatcaatactgggtatcttggtgtcaatctggattctttccttcaggcctggaggaatataataactgagacttgttttatttctgcagagggttctaagccattcacttcccagatgggccaataatgctttgagtaatctggagatcatctttaatgcgcaggtgaatggaactcttccacagagggatgtgagggctgtagagcagagtgaactccctgaaactcagacgtcagctctttgtctctctatctctgaacacccttccttagagatcccatctctaggatgcatttctctgtagttagtttctaagtctcttgttcctgttctgcctttatttttttttcctggattctaagccagtatccccacttggctgtcttaatgtagcttaacatgtctgtaatcaaaatgatcatctttctgagattcaaagggctataagggactttggagagaatttcattcagttttcctcaaactagaataatgcttgcactgtctgtaaaagaacaaaagtgtcaaagcatccttttgttcactaaatttccttttttattatagtgttacttaaatattaggaagtaaaagtaggtataaacttcttataggctgttattatacaactatatgacccatacatatttacaaattaagtgcagccaaaattgcaaaatcaataccattcaaattaataccttaaatgtggtgaggcagctgttgttcaactgaaaccaaattataagttgcatggcagtaaatgctatcatgctgatcattttgagtttggccagtctatattatcatgtgctaatgattgaattctccacccatttttctacttgtatgaccttaatttgatggcacctgttccatcctcatgagtttgctacaattatactggtgccaacacaatcataaacacaaatataaacttgggctttgaaatcttgtgccagaacttggctttaaagtaagcatttaaaaaatccatatgtgtttattagactttgtttagatgactgttgaaatgaaaacaaagtgtttaaaatcctcttagagaacttaaatataatccctcagcaatatgtatacagatcttcctttgagaaaaactgattgtgttcagcctctcatgttacaaatggggaacctgaattctgaggtctctagtgagagaacagggactggaatctgtggatcctatctgttttaataataattgtaaagtataatagataatattatattaataaaataaaagcaaacacttagaatgagcttccatgtgtgaggcactaactgattaggcattattaactagatttattccttttaaggccccgcgatgtactgttatttccacatgttgtagctggggaacgtgctactcagagaggttaagtaacttgtctgaggtccacaccactaacaaggagcacaggtagggttcaaatccagataatctgactttggagctggcactctaactcaatgtgcctaatcgcttttcagtggtgtcattattttgcctattctccatctgagaatattgaagtttctgactccttccttgcctttctccctgcctcccgtggttatccccaggtcttggtgttccagtcctctatgtccgtccttactcttattcctttgctacagtgtgatccagggctcctgccccttcttatcctggtagagggggcccacttgctgggaaattgtctccgccatggtttatccatgttgtgtgtccattagtgagtagtgggaagaatcatatcatgttggcaatgaaaggggggctatggctctggggtagtctagtctgaacctcttattttacggatgagaaagctgaggtacaaagcagggaagggatttcttgaggtcacccagccagcaactgagctgcaaccagaagctgagatccccaggactagggccgagcctcattctgtcccatcacagtgacttttcttccctcctccaaactatttttattttttatttttttgcagctgcttagcagcttgaagttagaagaaagggcagggaaaaggttttccgtgcttagccagggaaggaatcctgcaacaggatgtggggttgggtcattcaaattgggccagactccactggtcttgttgcttcttgcttggtattgcagatgggtttaaaagtgttaggattagagagataggcaggtttagccaaaggcagtttgtagccttgtggcagagttctttttaaagaaggaagtgggatgcaacaccctgacacaaaggggcttaagttgttataccactgcctgctaacctgttttccttaactctcttcctgatttctaaaggaagtatattttgctgaatcagaaagaaaagtgatttatttcaggttgctgatgcttagattgttagagttggaaagatctggcttgcatcttgtacagctgacagaactggggctcaggggggcacaggtgcccagagttggtcagtcaggaaagtagcaccagaaccagtctcctggtggccctacagttgcagacccttttttgctttgctctctgtgtatactaaagcttctatgtctctgaatctcaagttctgactggtagctactttccaatccacctggcttagatttctagattatattgtttagacgtcagaacctcttaagggttttggggccacttgttagctcacatagtgagaaccagccctgcccattaggtaggggaagaagttagcagtccatgatagctgttgcctgcagcgtatggatgttcattgcacagttcctgtctcctgagatcctggagtgtatacgcttggcctcagagcccagcacagagcctggcccttgggacatgcttagtaagtatttactgaatgagtgggaaatgtcttaaggcccattagtttgcaggtcttgaggaggctcccttgcactaggaagaatagaaagcatacataaagcctgtgtgctgccgccaggaagactagaaacgctatgttcagcctggagctgaatggtataccccagagcaaccctgttgaaaggcagtgcttgccttttcattctgtgtcctggtttgctggtaactcctgggtcccctgcctctcctgtacccccattgtgcagactgaggggggaccatcagccagggttagttttccgctgtttctgttaggcaaagaataaattgaattgagttgtgaaagttgggtgcaaagctcagtttgggtccaaagtaacagttaacttgtgtgggtggcaggtattcagtacaaacagggctggggacaggaaggggaagagaacttcagagctttcacgatcctcatctggttttaggctgatccagaggccaaggtccccatggaacaaactggacaaagtgagggtggccacatggcctcttttcttttgcctttattattaattttctcaaatagatctgactagtcatgtggctgggaaaatagttaattgtgatttttttttttttaaactgagtctcactctattgcccaggctggagtgcagtggtatgatctcagctcgccgcaacctctgcctcccgggatcaagcaattgtcatgcctcagcctcccgggtagctgggattatgggcacacagcaccacgcctggctaatttttgtatttttagtagagacatggttttagcatgttggccaggctggtcttgaactcctgacctcaagtgatccacccacctcagccttccaatctgctgggattacaggcatgagccactgcacccagccagagtaccactatttgggcattctttaatgaaaaagaatgaactatccaaaaattaaaactcctcatttatgagcttttagagaattttacagagtagatggaaactctctgcatcctttccccacttctagtttcacctgacacatttcttccctgtccttactcctgggccggcagcagtggtcatgattccaatcccagcttggccaccatctgcctcagtggcctaggaaaactcctttctccagagctttagttttctcttctacggaatgaagaaagttaaaacaaatagacatttattgtttcatttggataaatatctattaagcatctattacttgtggtatggttagctgggtatatagtggtgaagcagctgggcatgagtactgctttcgtagagcttacagttcagtgaggccagcagatgtgaaacatatcatcacacaaataaaaatataactatcaactgtgatgaggattatgaaggaaaaaatccggcaaactatggtactggtgttagatactagcaggtgtgggtagggatttcatttagattgacaggttgtcacattaaagctgagagccctgaagttcaagcaatggttagccaggcaaagatcagaggcttagagatagggaaatccattccaggcagagagactgggggtgcctgtcccctaggtcagggaacagaagaaagccagtggcactggtggagtgaataagactggcgggggatgagttggtagtagacatgaccagatcatttagggccaattctcctggggaaggagaatttaatttaatatttatttatttatttatttatttatttatttatttatttatttatttttcaagacggagtctagttctgtcgcccaggctggagtgcagtggagcaatctcggctcactgcaacttttgcctcctggtttcaagcgattctcctgcctcagcctcctagtagctgggattacagacgcccaccaccatgcccagctaatttttgtatttttatagagatgcggtttcaccatattggccaggctggtctgaaactcctgaccttgtgatcctcctacctcggcttcccaaagtgctgggattacaggcgtgacccacagtgccccctgagaatttaattttattttatgtgcaagaggattccctgaggtagtcaggccacattgtctggtgactcttgggatagagggaacttgaatgacaaaggcccaagaaagcaattgtaatcattacatatacatggaccattttatgctgttttcttctttcatttaacattatttagtgtgcgtgttcacatatttctaaatcatcttctgatttagaataatgatttctgatgtgtaggctgtgttttatagttttgaaagtaatactttgatatccattactttcttgattctcacagcaattctgaggtgtatgcgttgcaatttctgtttcacagatgaagagagtattgttaataagttaatggccgggcatggtggctcacacctataattccagcactttgggagaccaaggtgggcggatcacttgaggccaggaatttgagaccagcctggtcaatgtggtgacacccatctctactaaaaatacaaaaattagccaggcgtggtagcacttgcctgtaatcccagctatttgggagggtgaggcaggagaatttgcttgaacctggcaggtggaagttgcagtgagccaagattgcaccactgtactcctgcctgggtgacagagcgagactctgtctcaaaaaataaaaagttgctaagaggagggctgggatcttttggctccaaatctactgtgggatgatgcctttgacattcctgatagctgtgcagtaatccattaacacagtttttataagttcaaaccctgttgccaacatttagattgttccatgtgtgctgttacaaataaattactataaagattctatacatttaatcttttattatttttgtattatttctgtaggccaaaatctgaggaacaggattactaggttgaagggaaatggcccttgaagtgtctgatcagatgtctttccagaggatccaaccaatttaaatagccaccatcaatgcatgagactttgtagttcagggaaggcaggcctggttttaaaaatcatttcccctctctagcatttttctgatgtgatccttaagatttcactttagttttcccaggtctcattggcatgtatgctgttagggatgggtctaaaattaatttttcttcacattcatatcatgtcatcccagtgattatttaataaataatcacttgattaaatagtgattccttttctagttatttttgggacatttattaaaacctggatatggtggctcatgcctgtattcccagcactttgggaggctgaggtggggggattgcttgagactaggagttcaacaccagcctgggcagcatagcaagactccatctctataaaaataaggaaattagtcaggcatggtggtacttgcctggagtcccagctacttggaaggctgaggtaggagaattgcttgagtccaggtggtcaaggctgcagtgagctatgaccatactactgtactccagcctgggcaacagagtgaaactctgtctgaaaaaaaaaaaaaaaaaaaaaaaaaaaaaaaaaaaaagatgtgtagggagcaattttggagttattcatttggtcatttgatatgtagttttagttttggtgctgatagagcccagaatgtaccctgaatttgatgaacattctgatatatgggggagctcattgtcccccacttacctttttgcctctcagaatatcttttgatatttttatctgttttttccccattgaatgttattaccttatcaagctcaaaaaagtaccctatcgctattttaagttcagttgtgttaaatctataaattagcttgggaaatttggatattaaatgaactcatgaagaagcagagtttagctctccttaattctcatcttcctttatttatcctactacagttctgtggttttcttttatgtaagaagcacatgtttggctaagttaatgcctaggtttttttgtttatgtgtccattctcactgtggatagtattctcttttccccacattatattaatttaactggttttcagagactaatagcaatgctattatttaggagaatttaccttggttctgattaacttacccatacttgcaaatcatttgcagctttttagttaactttgtgagttctcttagatttacgaccatgccagaaacagaaaggatattttcatctcttcctttctgatgtttattcttcttgtttcctttttttatcccccattatattctcaagaatctctcaatactaagaaatagcgacttcatttttcagcgcggagtgcattattttggctaccatgattcagaagcctcttgcctaaggcccaattttattctgctagttttctctgttctttgtacatggcccttgcgctgccctaaccttgaattaacgtggctaaatctcaagaatttaagagcaccgtgactgtgtcctcaggctagggagggaaatgggttcacagagtgactggattgtggtctatgaacttcggcagccagcagcaaaagtcaggcatgaataatcaagtggacagtgaacatctgtagtgtgggagatgttggcataactatgaatgatgattcaagagtggtttgatgcatattgaataacatgatgataagtactagactctgtgctaagccttctatgtgaaatacatttaattctcataataactctagagcagtggttctcgaccggggccggttatccccctaccccaccccaccctcacccttccaccagggacataacatctggagatatttttggttgtcacaatcctgggaatgtatgtgctgatatttagaggttgaggtcagggatgctgctgaacttcgtagaattcataggagagtctctcacaacacctatctggccccaaatgtcagtagggtcactatcaagaaaatctgctctagcagtgcctgctcatattatccccatgttgaaatagcaagatgggaagtgcaaagtggtgcttcggtactcttggagcagctttgactttggtgagaaacgccttttaaaaacaatgtttcttcccatcttcccaccccatggggaggtgtggggttgggtgggtaggcaccaaagcaagatttagaagagttttctgtaggaatttataatggtaaaggatcaacttcatttccaagctatttatgagggtttatgtttaggaaaagtgctaagcttagagaaggaggagaaatctgattttattaatgagtgtagccataatggcatatcctggcagaagtcaactttggtttctagagggaggctattatgaaaagaaatacctggaacattcccctgggtttggaaggtgagttctaggttcaatgatgggaagaattttagaggtccaagataaaagggcaaagattaaattttgtctctcatgagttctctggctcaggtggtgtgaactttgcagacagtctctttaattcactcatacatgctagtctcccagctcagcaagggctttgagagagcaggtgtctgtatgctctggtaagtgaaggcaaagtgcataaggaggttggggtccataatggcgaagagaaggagcccttcagtcagagtggctttgaatcttggctctgccatttgccaatcttggaccattgggcagtgtattaactctttgaatctcagcttcctcttctgtaaaatgtgtataacaagagtactaattggattgtttgatgattaaatgagttaatgtgtataaagcactcacaaccctggtacatagtaagacctttcattattattatcatcatcaattttttttaacctcttttcctgatctgcttacactcaccagcttcagctgctccaaatggcttgtaagattttttgtttgccctttgctgtcagttgccatggggaagatccattcatttttttcagtcaaccaacatattttgagcatctgctgccctacaggatcctagatatgggggctgcagagatatccaggaacataagccttgattaattgggtcagatcagtgctcagcagggctggcaagtgctaggtttcttttaagtggcatatcttaaaaggtatatgtcctaaacatagctttgtgatggcagcatgatgggtacaaaagcacacacttaagtgtcagtagatctgggttcaaacattggtgcagtttcttatggctcgtaacttgttcaaacctcagtttcttcacttctaaaacggtaatgatacaacctacctcacagggttattatgaattaaatactggagatgagatacacaaaacgtcttgagtacacagtagctgcccaatattggctgtaagtattataaatctacaagctgtgaattaattttacctctctggatcctgttgatatttctagaccattccacctagtggggccatttcctacctgagtcacccgtggtgtcaaatagaatgtcatgtggcctcctgagttgggtagaattggctgctcatctcaaccccgctactgactatctctgtgatttacccttcctccagccttagccttgctacatataaaatcaagacaataatgtttcctatctcacagggttgtcctgaggattaaattaagtaattaatataaaatgtgccttgtacatattgggccctaaataaacagtagctactatttatccttaaagtacaaatggtagtttcagagcttcaaggctgatggctatttatcttactcatactctttgtttagcttcatttttttcccctaatttcattagtattttcttttctttttttttttttttttttttttttttttttgaggtgaagtctcactctgttgcccaggctggagtgcaatggagcgatcttggctcaccccaacctctgtctcctgggttcaaacagttctcctgcctcagcctcccgagtagctgggattacaggctcccgccaccatgcccagctatttttttgtattttcagtagagatggggtttcacccttttgaccaggctggtcttgaactcctgacctcatgatcaacccacctcagcctcccaaagtgctgggattacaggtgtgagccaccacgcccggcctcataagtattttctaaatttatttacagtcatgccatttaaaaggaaagttgtattcctgtctttgttaatatttataagtgattttattcagctacaagcttggaatggcatataattttgtattctgcttttttcacttaatattacatggctaatgatttctgtgtttcataaacattattctgatgatggcatgatatattgttgagtacatgtaccataattgaatcatttccctattgctatgcaattaagttgtttccaatattttgcaattataatgtttcaatgaatgaataactttatgcatatagctttttgatatcttaagttcagtttcctaggatgaatttccaggaatagtaattgggcaaatgggataaacatgactcttgaatacgtattgttaacattgctttcccaaagggctcaactgatttatatttccgtgttcattatcttttaaaccagctcatttactcaccaaacatttttaaagccattatcatgtggtaggcttagtaagaagaaagtgaccctaagggagaagcttatatataaatagggtccctggtgtaccaagtgctgatacagacacaaagtacctggggaaattgagatgagggagtcctggctcagctgggagaaaagttcattttcatagagtcatggttttgttctttggcagaaagaaaattgctttcttccccacccccacccccagctttattgaggtataattgacaaataaaaattgtatatctttaagatatgcaatgtgatatatatgtatatctcaacttaaaaaataagctacagaataaaaaggtgtttgctattaaaaaaaaagaaaaggctgaatgtcattcccaagcttggaaatttgagtatgttgcctctttgggattatttacagaaatattagcaagaccagccccatctttggtcttgagtactccactgtcagcatgctttcttccagagagggatccatttgcctttatttttcattctgttgtgccgtctatgcaaactattcttgatagttttatggtaacagtgtttttttgttccatgagataatttatacatgctcattgtggaaaatttagaaaagacaggaaagtattaaaaacatcacttttttttttttttttttttttttttttttaagagacagagtcttgctctgtcgcccaggccggagtgcagtggcgtgatctcagctcacagcaacctccgcttcccaggtttaagtgattctcctgcctcagcctcccaagtagctgggagtacaggcatgcaccaccacgcccggctaattttgtatttttagtagagatggggtttcaccatgttggccaggctggtctcaaactcctgacctcaggtgatccgcctgccttggcctcgcaaagttctgggattataggcaggagccactgcgccagccacacctacgttcttatcatcctagtacatccactgtcattatcttgctgtatttccttctgcccagtctcactctgatcatgcagtggcgtgatcatgcagtgatctcggctcactgcaacctaggccttctgggttcgagtgattctcctgccttagcctcctgggttcaagtgattctcttgccttggcctcccaagtagctgggattacaggcatacacccccatgcccatctaatttttgtatttttagtagacacagcgtttcactaaaattttgtatttttagtagagatggggtttcaccatgttggccaggctggtctccaactcctgacctcaggtgatccgcctgccttggcctcacaaagtgattacaggcatgagccactgcatccatcgccaaaaagattttttaaaagagtttaatgtagaaccatatcaaaggtctttggaaataaaaaacagttttttaaaaatatcagaaataaaacaacaaataaataaataaataaaaacacccaaaacaatctgaagcacgagcacctagcagaaaggttcaattatgatctattcatagagtggaatatcaagtagacattacaggacatgttttaagattatattttatgtcatgggaaatgctctcccagtatgatgttaaatgaaaaaacagaatacaaaagtatatatgctgcatagtctcaatattgtagagaaaaaatattatttatgtatgcatgaaaaaagacaaaagatgttaacagagatccattgttacttcagtttactagggattgtctctgggaggtaggattaaggtgatttatatttacctttttaaacttttctgtatttttttattttcaaattttccataaaaatataaggacttgaagatcaagaaaaaatttctgctttggctcagtgcagtggctcacgcctgtaatcccagcagtttgggagccctaggggagaggatcacttgaacccaagagtttgacgttccagtgagctatgatctccggatcgtaccgcctggacgatggagcaagaccctgtctcaaaaaaaaaaatctttgctttttttttttgtttgtttttgagacggagtctctctctgttgccccagctggagtacagtggcacaatctcagctcaccgcaacctctgcctcctgggttcaagcgattctcttgcctcagcctcccaagtacctgggattccatgcacccaccactatgcccagctacttttttgtattttcagtagagacagggtttcaccatgttggccaggctggtctcgaattcctgacctcagctgatccaccggccttggcctcccaaagtgctgggattacaggcatgagccactgtgcccagcccaatcttttgctttttttaaaaaaagaagacaaaaagggattttataccagtattatcttggctgtgtgactctgaagccacagttgtaagttataattactctgaaacacaaggccctgtgactcttttgggctctttggtgtttatcttgattacaacgttggaatatagaaatgaaaggaatgggagaggtgatagacttcaggcagtgtaactagttgtctgaacactactggctcaattatattgtgtctagtgatttccatcttgtccgtctgctaatttatcgcctggtaactcactgaggcagggttttcctttggagaaacctcattgttttaaccagtgtatcatgcttgtttagaagttcaatgatctttttaactcatcggagaagatgatgaccagacctggacagatggggaaggactttgcactctctctttacagtcctgagtgcacacaggtcaatatggaactatgtgtgaattttcattgtctttgagagccctcttctctgccccatagggagcagctttgtgtgcaattagaggagcaagggttgtgtgtatttagcacagcaggttggcctggtcctctcctctcaacatagtcaccacatacctggcactatgctaaggctgggaatgcagacagatgggtgcctgctttcagagtgctcaatgtgctgaggaagccagcaacagaaacagatgatttcaggagctccaggaaaatgctacaggaggagtgtgcctgggttactggagtagcacaggaggagggcttctagctcaggctgagattttagtaaaggaaattatgccacgatgaatcctgaagaatgaatagaagtgaaccagataaagcacgataggaagcatcttcccttacctaagggaagacacagaggtatatggaatggtatgttaaaaggttgggactccaaacagttctgttaaagcttagagagtggtgggagagactggagaagttgattaattagtaaatgaagttgtctgtggatttcccagatcccagtggcattggatatccatattatttttaaatttacagtgttctatcttatttcccactcagtgtcagctgctgctggaagtggcctggcctctatttatcttcctgatcctgatctctgttcggctgagctacccaccctatgaacaacatgaatgtaagtaactgtggatgttgcctgagactcaccaatggcagggaaaatccaggcaattaacgtgggctaaattggacttttccaaagatgctgtctttgggaaacatcacacatgctttggatcagaaaacctaggcttctaatttgttgataaggcatgaactcaggagactgttttcagtcctagtgaatggtgataattgtaattataacagtagacaacatctcttttacacattttaaatcatgaaaatagaataaccttactgataattttagaaagtggtgattaaaagcacatttaagataatgccttaacacctagtcttttccatatgcatgatgtcttaatcacacattgcaaatcatggaacacagaattttaagcagcatttgtgtagaacttctcagttttactaatattattttattttattctcataacaaccttgaatagaactcagatcatctgtcaatcatgtattttgataacagcctttacagtgagcatagaaaatacagtagtggctaacaacacaggctccagatgtcaggttatctgggtatgaattctggtgtcagcattcactaagcatatgaccttggacaagtgatttaagtttcttttaaacagagaatagtaatacctacctcatattattattgtcagtgtatcatcttacaatcacagtctttctcttagggctgggctcagtgggtggattgacactgcagaaatggccagatctaaaggatcaacatttacgtagctgggaaatgtagctgggacttcagtttcactgccctagtgatttttcctaccactaagcagctcagtccatacccctacgagacccacaagcttatgagatactgttcttccaggaaagcagtggggccagggccaccttttaattgtgtttcttggcctggtcccatctttctcacaatatatagcaacagttatttacttgctgattttctaatgcacatcacacatagtcatattaaacacacacacacacacacacacacacacacacccctcaagaaacattttctgagacgtgatttcctgatttcatcaaaaaagaaaagagcgggccaggcacagtgggaagtcaaggtgggtggatcacttgaggtcaggagtttgaaaccagcctggccaacacggtggaacctcgtctctactaaaaatacaaaaattagccaggcgtggtggcgcacacctgtaatcccagctactggggaggctgaggcaggagaattgcttcaacctgcgaggctgaggttgcagtgagccgagattgcgccattgcactccagcctgggcaacagagtgagactctgtctcaaaaaaaaaaaaaaaaaaaaaagcataaactgaaatttatatgcaatttatatgcctgtgagataattctgttttctcttttggaaccccaaagagatttttttgattgatgagcaaatacattttagattttatttaagcattatgccaagcaccactgaagtataagtttcaagggcaaactcagttttttcatctactagacgaatgattttctggaatgattacaagcaggcaagatggtgtagtggaaatagcaaatgtcttcggcatcagacaagttggggtttgtttgtatcctgcctctgcccttcaccgaggttgtgatcttgggcagattgttgagttttaacctagattcctctgactccagatcataaattttcagaaaagttctgaaattcttgtatatactgatggtaaatgagacttttccttacatctatgcacttctttgtttgtttgttttgagatggtcttgctctgttgcccagactggagtgcagtagtgcaatctccgctcactacaatgtctgcctcccaggttccagtgagcctcctgcctcagcctcccaaatagctgagactacaggcatgtgccaccacgtccggctaatttttgtatttttagtagagacagggttttgccatgttgaccacactggtctcgaactcctggcctcaggtgattcgcccgcctcagcctcccaaagtgctgggattacaggcatgagccaccatgcccggccatatccatgcacttcttgcaaccttaccttcttttctcatcaccctccagggacctagttggaagagcagagttaaaagttaaggtgaaacttggagaggtgtcttgtccctaggaacaaaggactggtttgaaattctctgtaaatcttccccagttcaaaccagagttatcaaggtcttaaaaacttccctgggtcctgagagcccattatattatttacttgtcttcctgtacacccactgcctagtcctgatcctacttttgtttgcaaataggatggggcacaacgtacaaggaagggcctttgccacccctgctaagggataacctgaaataccttcaccatcactgccctgtgctgcttttcacctatgccagtctgtctacagtgccagtgtctcctggcattgaaaggggagaatcttttggtcctttgagtatttggttgggttacataaatctccctgaatgaagagcagctgacttaggcaaggggccttgtttggttttccttgaactattaacaggaagatagggagattaactgtgtaaatgttcaataggccagagtccctgcagagggtggccacagtgatcagatcttatcacatccttgctttgggtgttgcctctctggttggagtatggatagaaaagaaagaaagaccctatattgaaatgcaaagtgcagcaagtcctgactttggattaacttctcagcccatttgcatgaaaataaaaagatgaataaaacaaggttcccactttggagggaggtggtagctgtgagatggaaggagtgttcctgctgggcaacagcagagtaagtgctggggtagattcactcccacagtgcctggaaaatcctcataggctcatttgttgagtctttgtcctacaccaggcactctgcaaaaacgctttgcctgcaaggtctcatgcgatgctcaccacagctctgtgaagttaattgtacttttatcaccattttacagatgagaaaactgagggtatggggtcaatgacttggctaaagtcactgcttagcaagctgcagggactggatgtgaattccaattggtttgactccaaagcctgtgaagctacttgttcttcaccacctagagctgtggttcttgataactgtgaactcttttggggtcacaaatagccctgagaatatgatagaagcaggagctctggcctttctgtccatacctgaacaggtccttgggttaagagcccctcgtccagggcctattaatcttgatcctcataagcagcatccatgtattacggccgcaaaccaaactgtgccagaccgaatcctaggaccaagcccaaatatgtcccatcatccttttggtaagaagctcattgtaagaaagaaagaggagagcaagaggatgacctagtgcatggggcctcattgttttaattagtgacaaaacaacaataataacaacaaaacccccgaagcttcacagatgacatcagaccccaagcctgtgtgtttttcaggtgcccttgaggagctttgtagctggcagaggaggtgaaactgacaaatgtttggcagatggaggagagtaccagaggggtttgagatgagctaaattccaatctaaccgcaggtgtgaggaagaggcttggattgggaccatggagatgggggttctactcccagtcacgccagctgactttgcgagtgttctttgtcagtcactttatcttattttatttatttttatttttttgaaatggagtttcgctcttgtcgcccaggctggagtgaaatggcgcgatcttggctcactgcaacctccccctcctgagttcaagcgattctcctgcctcagcctccagagtacctgggattacaggcgcctgccaccaagcccatcgaatttttgtatgcttagtagagacagggtttcgccatgttggccagggtggtcttgaactcctgacctcaggtgatccgcccaccttggcctcccaaagtgctgggattacaggcgcgagccactgtgcccagcccacttcatcttaccgtagttacctccttagagtatgaaaaaataggcttagggcatccccaagtcccctctatgtctgagagctgaggctggctgtcaaagaggaactaaggatgccagggactttctgcttaggacccctctcatcacttctccaacgctggtatcatgaaccccattctacagatgatgtccactagattaagaatggcatgtgaggccaagtttccacctgagagtcagttttattcagaagagacaggtctctgggatgtggggaatgggacggacagacttggcatgaagcattgtataaatggagcctcaaaatcgcttcagggaattaatgtttctccctgtgtttttctactcctcgatttcaacaggccattttccaaataaagccatgccctctgcaggaacacttccttgggttcaggggattatctgtaatgccaacaacccctgtttccgttacccgactcctggggaggctcccggagttgttggaaactttaacaaatccatgtaagtatcagatcaggttttctttccaaacttgtcagttaatccttttccttcctttcttgtcctctggagaattttgaatggctggatttaagtgaagttgtttttgtaaatgcttgtgtgatagagtctgcagaatgagggaagggagaattttggagaatttggggtatttggggtatccatcacctcgagtatttatcatttctgtatgttgtgaacatttcaagtcctgtctgctagctattttggaatatactatatgttgttaatgatatcatgcagcagacgtgcatctgaatgggctggctctaggagctagagggtaggggctggcacaaagatgcatgctggaagggtccttgcccataagaagctgacagccaaggctaggggagttctgtcttctctgcatcaggtcacctctctcacctctgtcactgccccatcagactacaatgtctgcaggtctttctcccctgagtgtgagctccctgagcaaagcaggatgctgccccttccctttgtattcctggctcctggcttcagtgcctggacataagtatgggcataataagtgtcccccaaatgagacattgaggattcttcaaatgcacaggaccgtgatgtgagttaggacggagtaaggacgatgggatgtggctcaggacaatcctgaggaagctgcagctgcggcacgcagggccacactgtcatgttcatggaccctagactggctttgtagcctccatgggccccttccatacacaaatattaaaaattatatttcatgactgcattggtataaagatgaatataatccagaccagattcatgattattcatacatttttagtgtattaacttttaattctgcttttaaaataaattaaaacattctaatatgcccttaagagtatcccaggcccaggccactgagcctactgtggttcatggataagttggccctgggggcatgtgtgtgcatgcatgtgtgtgcacatgcatgatgagccgggccttgaagggtggtaagatttgggtgtgtagaccaatggagaaaggcatttggggcagtgatgatgggtgggggagggaacatggtgatgaatggagctgggtgtggggagccatgggagtgggttagggccagcctgtggaggacctgggagccaggctgagttctatgcacttggcagtcacttctgtaaagcagcagaggcagttggcctagctaaagcctttcgccttttcttgcaccctttacagtgtggctcgcctgttctcagatgctcggaggcttcttttatacagccagaaagacaccagcatgaaggacatgcgcaaagttctgagaacattacagcagatcaagaaatccagctcaagtaagtaaaaaccttctctgcatccgtttataattggaaattgacctgcaccagggaaagagagtagcccaggtgtctggggcttgttcccattagatcttccccaaggggtttttctccttggtggctggcctgtggggcccctctccaggaggcattggtgaagaaactaggggagctggttgccacagacagtgatgtactaatcttctctgggaagacagaagaaaagtccccagggaagaatactacagacttggccttagggacagctaggggtgcagattgctgccaactgcattttttctgaagttggccatatggttgcagtgaatggatttatagacagagtatttctgtgcatataagagcaattacagttgtaagttgatatggataagtgaaagttaagcacttctttctaaaaagagaatgcaattcattttcccctaatcatttcaattagtctgatgggcatttgaacttgttgtctttaaaaagtgaaatctttacctctgatctggtaagtatccaggcaatttcttgtgtgccacccaggaggtatctggggagtgggcattttctgactgaggcattggctgccatagcatcagagcagccttccaggcagtggcctggcaaggggacagaggctggtgggagcagctggctgagtgcagccagtaatggcatgtgcatggtctgtagagaatgtagaagcaataatgaagccgataaaagctggtctgcattttattattatcatgcgccggtggttctaaacaatgtcagtgataaattactcctccccatcatggaccaatggctgccactgctccagggaagtgctttttattccgtttggtgtttagggagggatggagttggctggcctttgctgaaaggcctaccagtttgttttctatttggcaaaagaagaaatgataaagttctagagtttaaaccagactcagatttgagtttttttttttttttttttttttttttttaaggctacagaactgtgctttccttgggcagtaaaagaggcaatgggcaatgtgggacctgatgacaaagggaagcaaagctgtcttaggggtggcatggaggaggtgctgcttcacagcagagagaggtatggctgtgcttggagtgtccacttagacaactcctggctgtgcagccaggccatcgagatgctgtttccttgacctgcaggtcctggtcttgcacatggatgtttcttctggtgcaggagacagaaaggtagcaacaacccctgatcaaagcctcagtccttccttatttactggagagcccctgctgattgaccagaggcacagctggggatatttcctttacctctgtagcaagagacagcgtggtgcagaggaaagtgctagcatacattaccctgtggctgcatgactttgtgaataggttagttagcaccctttcagccacttcttcttacctgttaatgagataaaacatgtaattgcttaaaaacagtatttggcacataggaagcacttagtgaatatgaattatgattttttttggagtggtgacatctcaaccaagccatttaacccctcagccttactttcctcaactataaaatagcagctaacttgaaatgtaaactataaaacctaatgtagtatctggcacatagtagattcccaataaatgagagccagtattctttctaagacagtgatgcatttctgagcacctggccttgttcttctgccttgcaatttatgcagcagttgaaatagactggctgatgggggtaagttgtcaagcagactttctgatcttagtggaggagactgccttaaaacaacactaatttcctttttcttttcttttcttttcttttaagacagagcctcgctctgtcaccaggctggagtgcagtggcgcagtcttggctcactgcagcctctgcctcctgggttcaagcgattctcctgcctcagcctcctgagtagctgggactataggcatgctccaccatgcccaactaatttttgtatttttagtagagatgagatttcaccatgttggccaggatggtctcgatctcctaacctcgtgatctgcccgcctaggccttccaaagtgctgggattacaggcatgagccaccatgcctggccttctttgagaagctggagacatgagttaagtggtgaagaagccaaatctgtatctaaaaaccctacagtagtgtgcagagctctgaggagagaaggtcccttagattttgagtgtattattatgtcagtgcttgttttacatctctctgttcacgcagtatgtccccttttctgccttgcagctgtttcttaaattctttctttctttgcttgtcttgcagcacaaaacaggcttcagtatagggggaaatgcacagaaacactgccttttcctacaggaaatcagtaactttttactgattttgtttttatttacttattttatttgtttaaatttatttttagttttttttttttttagagacagggtctctttctgttacccaggctagagtgcagtggtgcccttagagctcactgagctcactgcagcctcgaattcctgggctcaagtgatcctcctgccttagcctcccgaagggctgggatgacaggcatgagccactgcacctggccaactttttgctgattgcgaatagcactcttgtcaatttcggagagaagctgagactggcatatgtcagtatggatccccacttagagacctgtgtttatctgcactgacaccccatcacagcatgatgagcttggccctcctgtgctgtctctcccagggctgggaggatccttgaagctgatctggtttggagctttgtcctcattcacctcctttaccacacacccaccttcccagggcggggatctaccactcactaagtagcccattctgggtgttgacagctctaattgttagaaaatattcaccaccctgttatgctttctagagaacaagtctaattctgttttccttgaaatagtcgaagacagctctcatgtttttctttccctgttttcccaaagtccatgattttttaggcaaaatggcctcctttcctcttatggaatgtttttcctccccatttctgcctctcctctggttgtgtttcagtatgtctgtgtgcttcttgaagtttactggaaattatgaaagtattctggcacagaggaggaagggatttttgcctcccttgttctgagtgctacatttccgttaatgcagtctgagattgtattaggcattttggcattcacgtcaccttgttgactcatattccatgtgcactcaaacaaaattgtgattattttaaataggcagaattgcaagttacgtgttctccatttctttgttgtattgttggctttttgaactaaagggaaaaatgtcttttttctgttttacatgtttagattccctatgctatcctatcctcccaaaaccattttagattctgattttgccatgtattatatctgatactcctttctcgtcatctagagatgtgataaacaactctctttggcctcattccagtcatcgataactgtgggacaaagacttgaagcttggatcagtccagtggagactaaccacccctgtagacccttttttcctcaactataaaatagcagctaacttgaaatgtaaactataaaacctaatgtagtatctggcacatagtagattcccaataaatgagagccagtattcttctaagacagtgatgcatttctgagcacctggccttgttcttctgccttgcaatttatgcagcagttgaaatagactggctgatgggggtaagttgtcaagcagactttctgatcttagtggaggagactgccttaaaacaccactaatttcctttttcttttcttttctttcttttttttttttaagacagagcctcgctctgtcaccaggctggagtgcagtggcgcaatcttggctcactgcagcctctgcctcctgggttcaagtgattcttgattctgtagacactaccactcaggcctatattgtaatcagtgctgggccactgggctcctgcttctgtgatccagttgggaagtttatcttgttcttcccttcagcttgcatctgctaaattcgctggactatacacaggtgatttgtagatatggggatctctactcaaatactctcatgatttccttggctagagcatcattttatttccacttattggaagagaccttagagaccagttagttcatttatagataaattagttgattctgtcattcaacccttatatattgagcgtctcctatatgcgaatcactgttctaagtgccgagacacagaggtgtccaaaacaaatatggcccctctccatatggaatttctattctagagaagaatctgacccagaagggggaagtgactgtcccaagtctacacaaccacagaagggatattctgggaataaatcacggctaaacccccctgctgctccaggcagttctccttctacagtgctctattgtgctgttttaataatctttcaactgggaagaactcccatttcaggaattaagccgtggacaaatcttttaattatccttgaaatcatcctaataagaaatccaaggaggaagtcttacagggtgcctcacccacttttctcatcactggaactttttagacattttattattttcttcctaaaccagagtacaggcacacaagttgagtggtgtggtggctaaattaattaatgtttgcaaggcagtgtgagaagcattcattcatcttaaatacctatggtgactgcaactcagatgtaaaaattggataaatcctcagaaaccctagggaaagtgacatgtctgtattttgtctctgtgagatacagactggcagagataagtgtttctctgggtgagttttgtgtggtatctgggatgattttaggcagtacgtggatgagaacttttaattttaacccacatccaattgcaatttcatggaaattattgcttaggaggatgttcaacaggaaaaatataattaaagttaattcaaaagaaacattttctgtgaatatggtaaaacttgtgagagtagtttgtaaatgattgaagattggaaaacattggtataagagtgagtgtggggttttgtattaagattcattttgggaagaaatccatgctgcatccctcatgaagtgtgaactttgggcatgtgttgattctttctggcccagagtttacctgaagattagctgccctgagggtcactgagcattaaattagatgatgtctgtggatgactgatagtgaagctcatagcccacagttgacacataataaattcgagttgctttgcttccccttctgttcctggctgactgtttggcctttgccacttgttcggcctctctgggccttaagtttctttgccttgaaattggaactttctttggtgaaacaaccagaaaatgcttcagcccagaaacttggtcagtacttggatgggggatcacctgggactacccaaggatgtgggctgtctgctagactatagccccttgagggcaaggtgggcgccttgctcatggttccatcctaagccccagcacagtagtgggtgcatggtgagccattagtgaatctttgtggaatgaaggtgggagaaaataaaatacctgtacttcacagggtattgtgagggtcaagtaaaagtgctttaaaaaattgtattatatagtttattcccttgtgttagcccaggtcaacagagcctacgaataataatgatgacagaagttcttcaaaaagtcttggccttctttctttcacaaaattgccccccagagctttctggaagggcagccatgaacccagaggcctaaagtagatttactgggaagctaaaaatatttactttatttttcatagctcctttcaaggtcctctctgggggtcttagcaatatgtttacacagtggtatgtttttgtaaggtttgcaaaagtaagattttttaaaaatactatcttgttttaaaaagagagccccctaccaacttgtgtcagcctcaggcccccacctgcatctgctcctgccagggcatggtggggcaagaagcactgctccccttccaaagcttccttccttgccctggagtcatcctcactccccactccaagccacctgccatcgctgtgccccctctctggtgaatctggcattcttaggtgggctgagaagcagactggcccaagctaaggcctttctgatggggttgttgctgctgagaatcatgactgggtgggagaaggaggtgaccctttgctgtcttatttttactgtgtatttccttttcagctacttaaaatgtattgcttagtgatacctaatgggttcattagcctgcttcctactgaacatttccgctcaggcatccacttggtcccaaggcctgctcctctcccatattctgaaatctggactacagactctcattcaactccaggttgcactgtggacacagtcccctcttgagcaggtacctccttgcagtggttgggacgtcctacttggctcatagttgggaagtgcatatgctggagctgaagcctcttgccttcccgggatagggcgtcctcacatcccctctgagaagttccccagcttccctctgttccccgtttccacacttagcgaggctcttgtccactgctacatcccccatagccagtccctcagccttgccattgcttatgctggtctggaaacaattcctagacttgtggggcatctggggaagttctccatctttttttagctggcatgacccaagtggtgtgggcagggctgtggattctatggtgtggctggaagccaggtagcctctctctactgtacatggaactcagcaacttctgagtcaagcaagatcttagctctgcaggtgtcttgccctgtccaaagttatggccacaccagtaccttttaactctagaagcccagtaagtgttttgtgggaccgcaaagatcattttctagacctgctgaatatgcctagaacgggtagggatggctttcacgctgttcctagggctgacaagtcacacgtttctgggggtacatacacaccgcggtccctgtgaatggcactctccatgagaactgtgatgatttgagttgaatagtgcacagcctacatggttctctgccatggcctggagttccttatcttgccttctccagtgaggactagggctgcaactggcctactttggctcctgacttgggggattctgaaataccttttttttttaaggttgtggagctctctgaagcttataaggattttgccaggaaaagataagaaatatctttgggcattttgtcactgtgctggagatgaaccctttggaggacatatcaccttgttgaggtcaaggggcggaaagggacaggactggcagagagatccggggcagcagcctgccatcccgactgagtatggagtttctctctcccttcagctgcacttttgtgtggagtcagtggctcagctgccacttcccttatgttcatggcatgaatctggcttgttaggcctttcttttttttttttttttttgagatggagtctcactctgttgcccaggatggagtgcatggagtgtagtggtgtgatctcggctcactgcgaccaccgcctcctggattcaagcgattctcctgcctcagcctcctgagaagctgggattacaggcgcatgccacaacaccctgctaattttttaatttttatttatttattttttttcaaggcagaagaatttttcttagtacagaacaaaatggaatctcctatgtctacttctttctacacagacacagcaacaatctgatttctctatcttttccccacatttcccccttttctattcgacaaaactgccattgtcatcatggcccattctcaatgagctgctgggtacacctcccagatggggcggcggccgggtagaggggctcctcacttcccagaaggggcggccgggcagaggcgccccccacctcccggacggggcggctggccgggcgggggctgccccccacctccctcccggacggggtggctggccgggcgggggctggcccccacctccctcccggacggggcggctggccgggcgggggctgccccccacctccctcccggacggggcggctggctgccctgctaatttttgtattttcagtagagatggggttttaccatgttggtcaggctggtctcgaactcctgacctgttgatccacctgcctcagcctcccaaagtgttgagattacaggcatgagccactgcgcccggctctgtttttttgtttgtttgtttgtttttgtttttgttttgagacggagtcttactctgttgcccaggctggagtgagtggagcggcacgatcttggttcactgcaacctctgcctcccgggttcaaacaattcttcctgcctcagcctcccgaatagctgggattacaggcacttaccaccaggcctggctaatttttgtattttttagtagagacggggttttgccatgttggccatttgaactcctgaccatctttgaactcctgaccatgtttgccatgttgaactcttgacttcaggtgcgttggcctcccaaagtgctgggattacaggtgtgagccaccatgcccagcctgtttggcctttctgatatggctctgactaatctttttggaaattagtccccagggttatactggattttacttagggaaaagggtcatgcctctctggctgtcagatttactgatagtactaaggactcagtggggtggacctttgattctggtttgatttttgaaaatcaaaaagacgtgagctccagggagcagggtggctttggtgacatggcaagatagttggctgtggcagggagttgagggaagtgggtagaaaattaacatcttgtaaatattccctgggaaatataccttcgtgttaagagaacagacttggcagccagatggcctaggttcaaatcttggcttgatgcttatcagctgtgtaaccttggataattccatacatctctgtgcctcagtttcctcaaatggaataacaatagtacctccctcaggactattgtggcaaattaatggacgaataaggggaagcacttagtacagtgcctggcccagcataggtaccaggcttgttcttaagctcactgcatttttacaatcatcataaaatgcaggggatacacacatgaaggagccgaagttcagagaggccaagtaacttgcctaagaaagcacagctggcaaggggcagtaataggaccagaattccagtttctcgtgctctgttgttgttatatcctaaagagagcagctctgagtagccagaagcttccctaaagtcacaggacatggggcatgggctggctgggatgagaaaggagacaagagggcttctgaaagaaatgccagattcactccacttcctggcttcaggcaccgatggaatgtttcccaaggcccatctagaaagaacatcctgtgactcacagccacttctcattttctgtctgaaccccctcacccattcaggcagctgctaaagttgaggttacagcctcagactatattttctgtccttgtggaaccccagtgtgtcatcttgttgggagatctggtgatacatgtgtcaacattatgtcatcaaaatggaaattctttgaaatctttaggtgattgcaattcacgttctgtatgtatgcacttgtcaaaagttttgatttgaggccttagaattttatatttggaaacctttccactaccatgagttttcccagacctgtcaaagccaggctgcatctcagaaaccaggtctttgatttccatccagggcaagggcctgggcccagctgggctgtaagcaggtgggggtggggagcaacgctgcactgcaatgttgaaatattacttgaactaaatcaaatcaaagatcagctttactcagacaagaatagaaaacacaattgcattcgattacagaatagtgtgtatccccacaaatatcagactgcctttaaaaagttttgaattgttaacatcaagaacagtgttgcgtgtctcctgcttttccagcataaggtttatttattctgtgggtggcaaagagcaatttgggagtccagtttgtttctcattgaaagctttcccatttctggtcctcttgtcactgttgcattgaggcaccaaaaggcaatctcagtgcgacactattcaacagactaagttgcaccggataatgataccattttacatttttcatatattattacattgaaggcttcaaacagcactagcaggggcaaattggtattattatctccatttcattgatgaggaaaccgaggctcgaaagggtaatgtctgttgtccaagattaaagagtaaagttgtacgttgaatcggggtctgactcctaggcttagcattttctccccacactatgctgccatgttgcttattccaacattaggaagcataggtgccatccccagcttttgaggccaatatcacgatgaagcatttttaaaacatctcattaaattgctgatatagtggaaagaaccaaagctttgcagtcaaagctgtttgggttcaaatttaccacttgtttgttctatgaccctgagcaagatattctccagatctgtttcctcatttgaaaaatgggaataataatacgtttctttataggctgttcttaaagattctggaaaataatgctaatagtgtgcctaatgcttggtaaatatgagtcacttttctgtgcccacaaagcactactatgtcccttaataaattttgttaattttaaaagttagaaaaaaattaaactatttatacattgtgtatgttaattcttccctagaccagccttaggaagaatctcatccccaacttgtaaactcatctttttccgttctttttgtgcctggacttctcagggccctgcaggctgattctagtcccatgttgtgtggtgtttgaagtgtctggtcccttttttcagtgagagaccagctcatccttgggaactgaatgcctcaaactctcttttctttttctctcttccccttctgtttgatgtagtctttcctgtttctggactctgtttcttcatacttcctatctcttaccttcttttcactccttttgtcttccagctgtcctctctcatttttctgcctctctggtcttcaggtagagttttcatctcagctatcttcttgctttttctgatgttggttctttgtttcttcttctcattctgttcaggtccaaaattcatttgggtcaatgttatgtcttagtgttatcttccatttccttctgagcttcaaagccaggctgactgtgcccttccacgccctggccagtgtgaccaggacatcctttccctctggggctgcactggctctttgggggaattgttaccattcagggtcttcaaccctcattctagggacttccagtaacttctcccaccttccctcttctcagtaagacatgggtattgtcttattctgtttctgctgctagaagaaaattctcgagactgagtaatttatacacaatagaaatttacttctcacagttctggaggctgggaaatccaaaatcaaggtgttggcaggtttggtgtctggtgagggctgctctctgcttctaagatggtgccttgttgctgcatccttaggaggggacaaacgccatttcctcaactggcagaagggactgaagcctctccctcaagcccttttataggggtcctcattgtcaggcctctaagcccaagccaagccatcgcatcccctgtgacttgcacatatacgcccagatggcctgaagtaactgaagaatcacaaaagaagtgaaaaggccctgcctcgccttaactgatgacgttccaccattgtgatttgttcctgccccaccttaactgagtgattaaccctgtgaatttccttctcctggctcagaagctcccccactgagcaccttgtgaccccctgcccctgcccaccagagaacaaccccctttgactgtaattttccattaccttcccaaatcctataaaacggccccacccctatctccctttgctgactctcttttcggactcagcccacctgcagccaggtgaaaaaaacagctttattgctcacacaaagcctgtttggtggtctcttcacacagacgcacatgaaactcatggtatctgtgaggggccctaatgctattggtgagggcactgctcacataacttaatcaccccttaaaggccctgcctcttaatactgtcacattggtgatgaagtttcaatgtatgaactttgaggggggacacgttcaaatcatagcaggtgtgctattgccttactagcaaagtaatctgggggaagatgagtaatgtctcgttccacccctgattccagtgctgactgattctggagtggcagagagggttggaggctcaccgctctgctcacccgaccctctggccatctcctcttagaatgcaagggcagggattttgttacacagcgcctcttttgttataggctagctcctgccttcaaggagcactgagaaaaatattatccctttgaaccacaacactagtattttgggtactgtagccattcagaagtttgttgaactaatacaagtttatattatttgtaaaatactagaaggaatgtgtggttcctaaagttatggtattcccattggttgaaagagaagactctggcttcctaatgccttggaaggttcagggagcataagcctaaatatcctggtttctcttgggaattcttcacagcttgtcatctatgactttatccacatttattttgaacatgtttaattttcagcttgtattttctcaaggagtatgtgtgagtcagcattcagagtacttaacacacttagtgtcattagtgataacttaacccacacgtataggaagctagacctccatttacagaaaaatggaggctcagagagcctaactgactttcccaaggccacataactggaaaattctggaactgagttttttcaggtatgtcttggtatccctcggtgagccttctctgtagagaaggaagtgtctcctgggttggaaagcccaggccgggatgaacagcatgggtgtccttaggctgtgtgtaccacacacccctggcctactctcccctgctctaaggagtcacctgaaggagcagctgcatcaccccgcctcaccccttctcctcagcacccaacaaccaggtcttcccagagagtgctcagctattggtgaagcaggcatcgtctattcttcaagaagacagcagagcatcaggaaaacaaaacaccaaaaaaataccataaagacactggagtgtatttgttaccagcccttgtataacagagaagtatttcaaggtcttatttgtaaggctggacaagctcaggctgattaaaaccacgagttagaatttgtctcccgctcccaggccctgctcagttgacagctcctagcaggctgggaggccccaccccacccccaccccaggggtccattgaagaagaccatctgggcctgggatgctgatgtgattttccctacttctccttttttttcatttgcctcctccacccacttctaaagcagctgattgctctggttccttttcatgttgagcaaaagagaagacagatcttgaaacctgagctggggactggagggcactgaccgagagtaaccccgtctggctcagctcagctcagcaaagggctttcctcctccgccttcctgagctgctctccctcctctcctttcctccttctttcccagcctcccccaagctccttcacccctctcttccctctcctccctcctcccaccttccttgtcctctatgctcagagaactgaaggaacactgaatggcctggaaagcaggacctcgcccccaccccgcgtcatacccctccgcctgcacgtgcaaatgtgttcctcagcttggtcccagaggcctggacctgggtcccagaggtcccagctggttccccggcttggtcccagaggcctggatgtgtggcaagaagctgagggttctgcttcgtttcttccagcccacaaacacacatgtcacctgttttttgttctttttcctttcctttgccccactttacagaagctcttggctaattggtaggtcactgtttgctcctccaggcaaaaccaaggaggctgagctcagcaggtcaagtattttggtctgtattgaagagactgtggtgggagagccctcttgaccttctgctggatagtgactttctcttctgctggcagcagtagcccagctccgcatcctgtgacagaggtcataccttccagttacccgagcgaacacttggagcaagtcagctttttcccctgaaacagcacgttcacgttcttgatctttggtttgcacaacaacctgtgaatgttattagccccgttttttttgtttgtttgttttttgagacagagtgtcgctcttgttgcccaggctggattgcaatggcgtgatctcggctcactgcaacctctgcctccaagcaattctcctgcctcagcttcctgagtagctgggattacaggcatgcgccaccacacccggctaattttgtatttttagtagagacggggtttcttcatgttggtcaggctggtctcgaacttccgacctcagttgatccacccgtcttggcctcccaaagtgctgtattagccccattttatatccaaggaaactgaggcttagggagatttaaataggggggaaagtatagcttcatgattacacagtcaggaaatggcagagctgactcttgaattcagaccctgtgatgctgtatccagtgctgattttgttttgccctgtgttcctttcagtgtcaggtaagaagacctcagagatcatcttctccaacccacacattttactgattataaaatccaggtccgcattaactcattggccaaagttaagtggctaaatgactctcctgttcaggaagtattccctgtcttgtgtggaatgattggtctttcgtccaggtcatcttccacctatatccatccttgcagtgactggtggatatgatcattcctggtgattccctgtaaaatactagatttatttattctttcataaagttatgagtagacaaatcagtcagcttcaacctttcctttaccttatagatagtatcagcagaaagaactcaataattctgtcttaggaactcagccaggctaatatgtattataatacacacatacatatgcacacacatacacacatgtgcataccttagatcacaaattcaacatctcaacttagccgccaaagccacttctgtgtcttgtctattctgaatatgctttaaggttaaattagccatgaatctgttcagatcagtcattcctgaaaatgatgatgatattagccatcctttaccgggcaccttactcagtgcccggcattatactaggtctgcaggtacatttgctcatttaacacctagctcagtccaatgaggtggatgccattgtcatctccattttatcatttaatcaactcagccttcctctctcctgttccccactctgcttctagctgccactcacctgactctcctcttgatctgggctgacgtggctgagtgggtttagcagaactcttgtgtcctctttacttggtttgtttcaagttcatgtcctgcttcatcttttccctaactcactgcaaggtgaattttcttctctgcaatcggcaattccccaaatcacatcaggtcattaatttattcactcatttgtattcattcattcattagttcatccatccatctattcattcattcatccaatttactgagtgcctcctctgtgccaggcactgctggctttggaattaaaaaccctggccctcaaggaatttctattcttctgggagcaggatatttacatgggtgactgcagcttgatctgtgtggtactagtggaaaacataggatgttgggcacaaaagagtcacaaaacgccgggcgcggtggctcatgcctctaatcctagcactttgggaggccaaggcgagtggatcacctgaggtcaggagttcaagaccagcctggccaacatgatgaaaccccaactctactaaaaatacaaaaaggaataatagctgggcgtgatggcgggtgcctgtaatcccaacaactcgggaggctgaggcaggagaattgcttgaacctggggctttggaggttgcaatgagccaagagcgggccacttcactccagcctgggtgaaagggtgaaactctgtattaaaaaaaaaaaaagtcacaaaaaagggctggccacctaacccagcttgaggatgggaaggccagggcaggcttcctggaggaggtgactcatgggccatgtcatgaggatggggtaagaggagaaggtatgtttcagacatctggctttcttaatattcttggctttccacccattttcctgccagcaacataggggagaagactgagaccagcagatacaaagccactgtactctgtcctcaccccctccttttttctccccttcctactacccagatctgaggttttgagaaatctcttctctaattatctgcttgttcattcatttgttgagaatctactatgtgcatagcattatgaccacaaaatgtcctggtcgttgtcatcatgagaggtcttaccccttcctctccagccacttctagggatttttgactctgtccttttccagaacttggctccagtctggttgctcgccatgaagcacttacagataaacctcatcttgggccagtgcttccatttactgtctccttttggcttgcttatccttccttctgccttcttgaattgatttgcctctttatctcccctttcagccttgaaagttcctcgaaggcagggactgtgtccccatcttttctataaatggcattgttgtacattggtaaagttgagtgaaaaaatctttttgataatcacaaattattaccatatattgagcacctaccatgatgagtatctctgatcttcatatctttgaaatgtggatactattaccttcacttaattggtaagaaaatttgtgctcagggaggtaaagtcactttctcacagtcacacagctatttcacaggagagtgcagtatcaaatttaggtttttctggtcccaaaccctgatgtttcccccacatcattgtttctcagacttggctgcaatcacctgaaaaattttattaaattctttttttttttttttttgagacagagtctcgctctgtcacccaggctggagtgcaatggtgccatctctgctcagtgcaaccactgcctcccacgttcaagtgatcctcctgcttcagcctcccaagtagctgggattacaggcacccaccaccacactcagctaattttgatatgtttagtagagactgggtttcaccaggctgatctcaaactcctgacctcaagtgatctgcccacctcacccagccaggttttattaaattctgatgcctgggtcttaccctagcagttctcattagttgctccatggtgtggcctgggctttgggatttttgtgaagcccccagctgagtctaacgggcagtcatgtttgagaaccagtatactacaccatgttgccttcctgttttcacacaggttggtgctagtgtgtgagtctaagcctacatgggtggatatccacgtgatcaggctgcaagttctttgtagtggaggatctttggccctccctgctgcttcccaacccagcgaacctaccacaccatgcacgtgcacagccaagggttgttgactgtttaatcagtctctgggttcttatgtctcatccgggggattcactgataggaggctggagcttgatcacatccagatgttctcatcttcagagcctgttaacataacagaagtcttataaacatgctgagcacactcactggtctggagagtgttgcaggatgacctaggcccattgcaggggtggcctgggtcgccctcccacacttctgccaccctgcttgggaaggagggagctgttttgaagttccctggtgcaatatgatgtattgctctggctctgctcaggaggaagctatggcccacctagtcagtgagggttagctaatacgtgtattctgtttctgttgaggtttcacagaggccttttttgacccttcattttatagataaggcagtggaggcacaactacatgaaatgactcgacaaataaatggatttagaacccaggtttctgactcccagggtggtgctttttccatggttgtacagtgattaatgtctaccttttcacaccagtcctcaactgaagacaccagcttacaccttccttcctgtttctcccaagaacagaaagtgaccccggatgtcgctttctgttcctgggaaggcagttccagtggttagaagtcctgttcactcctggggtgtggcctggggatggtcctgacatccctgggctcttcctggacctggccagctaaaaggaaatctcctatgatggtactcagatacttttggaaccttgtcagccctaatcccatctcctagtgtttagtattcagctacccttcactgggcagtaattctgtgccaggcctgatctgggcattggtggtactaagaacgcatattccctatcctataggcatagtctggtagagacaacatgcaagtaaaacaatgttccttaaactgtggttccacacctccctcccccaacattaaaagtgtaagggatgcttattcaaatgtagatttgtaggctctgcactctagacccactatttcagaatctctggggactgggcccaagaaactgcattttcgcatgctccctaaatgaagcttaggtgctctgaggtttgacaactgcagtagagagcctaatgctaacagtgtagagtcacatgtgatgggaagcatcaggtaggtagcagtttgcaggagcactgattctgagggacactaactgggcctaagaacagctactggctgtcatgaggaataactaggagctagccatagaggggtagcagtgaatcatttctctagcgatgtaaatcttgctcaatttattctgtctatataactcaatattactgaagtttgcctaaagcagaatacacctggatcatacagcatttatgagagactggctgggctgtcaggccctcctgttactttatctctgcatgtgaccctcttagctccgcggattaactcctgtcctcattaagcctcacactgtagccccattttcagatcaaacctgtttctcttctggtaaatgatttcagtttgcaaagtttgccctctagaggttgcttagtgcctggccatgtgggctcagttcatgtggtcctgatgagctggttttatctttattacaaagaagttaggctgttaggagagtgggttggaaggagaagaggtagacagccaaatgagatgagtcagggaaaactatactgtttcggagtcatagggctcctaccaagcatctggtcagaaacctctcattttggagatcaagaaattgaggttcagaaagatgacatgaggtacgcagggacgccaccagacacagcctccaactctagaaactaaaattctggattcttagtgctgctttttctgttttgttgcactggattgaagccttttctaactgtactcagagggcctattatttagggagattccgtatgaaatcctttagcaatcaaatcatttaatagggctgatggtttaaatatatgttaatgtgttttcctaaagcctggcagacctgggttttggagctttgtatcacatgttttatgtttggaatgaaaatgagaccatgtctgtgaaggcactttgatatgcgtaatgcactctgccagtgtttgtcaaaacatggtccccaggtcagcagcatcagcatcacctgtaagtgattctccagtcgcatcccagggccgctgtatcagaaactctgggggtgggggtgggggtgggggtgggggtgggggtgggggtgggggtgggggccggcccggcccggcccggcccggcccggcccggcccggcccggcccggcccggcccggcccggcccggcagtctgcattttaacaagctctccaggtgattctgatgcatacttaagtttgagaaccattgcttgttttgcattaaacaggagattagtctctgcagcttgtgggaataaagctttaaatctctccaattttagctctgtgaaaaggcagtggggagacaggaatgaacggactagtgccacaaagctcaggtggggtgggtgagatcatttagaagagaaagaccgggcatggtggctcacgcctgtactgtcagcactttgggaggccaaggcaggttggatcacaaggtcaggagtttgagaccagcctgcctatcatggtgaaaccctgtctgtactaaagataaaaaaaaaaaaatttgccagtcatggtgatgcatacctgtaatcccagctactcgggaggctgaggcaggagaatctcttgaacccgggaggcgggggttgcagtgagctgagattccaccattgcactccaacctaggtgacagggtgagactccgtctcaaaataaaaaaaaaaaaagaaaaggaaaggctgtgtgtgtgtgtatgtgtgtgtgtgtgtgtgtgtgtgtgtaacagcaccatcacactgtttgagttgaggagcacatgctgagtgtggctcaacatgttaccagaaagcaatattttcatgcctctcctgatatggcgatgctcccctatctcattcctgtgtgtgtttagccaggcaactgttgatcatcaatattatgataacgtttctccactgtcccattgtgcccactttttttttttttttgagttacttactaaataaaaataaaacactatttctcaatagacttgaagcttcaagatttcctggtggacaatgaaaccttctctgggttcctgtatcacaacctctctctcccaaagtctactgtggacaagatgctgagggctgatgtcattctccacaaggtaagctgatgcctccagcttcctcagtagggctgatggcaattacgttgtgcagctactggaaagaaatgaataaacccttgtccttgtaatggtggtgaaggggagggaggtagtttgaatacaacttcacttaattttacttccctattcaggcaggaattgccaaaccatccaggagtggaatatgcaacctggcgtcatgggccagctggttaaaataaaattgatttctggcttatcacttggcatttgtgatgatttcctcctacaagggatacattttaagttgagttaaacttaaaaaatattcacagttctgaggcaataaccgtggttaagggttattgatctggaggagctctgtctaaaaaattgaggacaggagactttagacaagggtgtatttggagacttttaagaattttataaaataagggctggacgcagtggcactgagttgagaactgttgcttgctttgcattaaataggagatcagtccctgcagcttgtgggaataaggctttaaatctctccaattttagctctgtgagatggcactggggaaacagaaatgaacggactagtgtcacaaagctcaggtgggatggacgagatcacttcaaaggtctgtaatcccacgtctataatcccagcactttgggaggccaaggcgggaaaatcacttgaggtcaggagttcgagaccatcctggccaacatggcaaagcctgtctctactaaaaatatgaaaattagctcagcgtggtggcatgctcctgtagtcccagctactcgtgaggctgagacaggagaatcgtttgaacctgggaggcggaggttgcagtgagccaatatcacgccattgcactccagcctggctgacagagtgagactccatctcaaaaaaaaaaaaaaaaaaagaattttataaaatcaggaaataatattagtgtttatgttgaattttaactttagaatcatagaaaacttcctctggcatcattattagacagctcttgtgcagtgggtagcaccagacccagcttgcatggttattgatttttcagagacactttttgagcttattctctggcagaaaggggaactgcttcctcccctatctcgtgtctgcatactagcttgtctttacaagaagcagaagtagtggaaatgtttattcttgaaaataagctttttgcttcacatgatctagaatttttaaaattagaaaaatgtgcttactgcgtgcccttctgaaactaggaaaatatgccttgtgtttaccaattgtgtggttaggagatgggccaaaggcatcaggcttttgaaagtagttgcatttagcataatttccattgccccctgccaatttcatatctgtcacatctaatcagtttaaaataaggggcatcctaagcatggagatggtccttggatggtccttggagtttctgtattttcagtattcttttttttgagcatacaagacatttattgaaaaattcttgggatcaatacttgtgtaaggaaaggaaagggaacaaagcatgattgggcagaggcagaagatgacatcaacaaaggccctccgttgtcagtattctttttttttttttttttttgagttggagtctcgctctgtcacccaggctggagtgcagtggcgtgatctcagctcactacaacctctgcctcccaggttcaagtgattctctgcttcagcctcctgagtagctgggattacaggcatgcaccaccacacctggctaattgttgtatttttagtagagacggggtttcaccatgttggttggccagactggtcttgaactcctgacctcaggtgatccgtctgccttggcctcccaaagtgttggaattacagacatgacccactgcacccggcctgttgtcagtattcttaaacatagacactaactgtaggctgacagcctagcagcaaggaccagttaaagaaatgagtagaactgaagtgtgcttgagtatctctggcagtcagcaaaaacttaatgggaatcatggtaggccaaatgttctgcagtatttcaaaagctgcatgggttttgagaggcttttggtccatcactcaccttaggttgttctacaagcacatcagcctgccccaatttaaacagggcagttagtaatggtgtaataaagagtctgcattgttcattccttcaacaaatactggctataatgtttcagcactgtggatgcaaagtgagcaggataaacaggctcttctttcaaagcttgtggtccactggaccacgtatgaagtagaatagtttaggtccagaaaggcaattaagtaaaatatgaccaagaagaggctctctagtgggtttggtataaagaaaagataagaatgatttagaattggcctatcaatgagataagaggcctggctttctggcactctgctctagggcaagtaaaatggagaattccaaattctgaaattgttagaacatagttctgtgtcttagttaaatatctacacttacagataaatagcataaatgctttctccccatatttcagcccagtcctacttaaagacaacataaattgcaaaatagtgaggatgttgttcatctaataaaagtggttccaggaattcagactctggattcctgtttgccaaatcatgtgtcccactcttaagaaaacgagttggactctggatttttctttgcaagagggacaagagtgtgggagatactgagttaatgcaacttgcaggttttaagtgtcctgtcattgtgccttgtgctttgatacattctgagtttcagtaaagagacctgatgcattggactgttgcaatggaacctgttttaagatcttcaaagctgtattgatatgaagttctccaaaagacttcaaggacccagcttccaatcttcataatcctcttgtgcttgtctctctttgcatgaaatgcttccaggtatttttgcaaggctaccagttacatttgacaagtctgtgcaatggatcaaaatcagaagagatgattcaacttggtgaccaagaagtttctgagctttgtggcctaccaagggagaaactggctgcagcagagcgagtacttcgttccaacatggacatcctgaagccaatcctggtgagtagacttgctcactggagaaacttcaagcactaatgctttcggaatgtgaggcttttccttggacagcatgactttgttttgtagaaaagtacggctggctgggagtttgtgatataatttagttcagtggtattctaagtgttcttagtgttctttcagacttttgggccatctcccaaagggtgaatgggaagaataagctgggtgtggctgagtttaagccaaaagttttttgtgcttgtttcaatcagagaagacctgctttttcatgtttttactattataatactaagcaagagctcatttgaaaacagagttcttcatatttaaaaaaaaaaagtcttgaaaccattgatgggaagatggatatctatttatgtttaaaaacccatcataaagatgacattgtgggctgtcacagttggaaggccctggaattagatgagaccacactatttagcttacttagtaataacattgcaaagaaaaattccgacgaagttttttcagcctaggaatcaatagttcagagaagcactctatgagaatacccattcattcttaaccaaaaaatactggtgagcctgagcagtttggtcatcagagtgttttatatagttccagaacaaatatgtctctaggtgttctgagagctctggtgaaattcctctcgctaccccaaacatcatcatttaatatccaggattctggttttctactcaccagatagattctcttaaaaccagggaaagattcctggaggaaggatgtatctggaaagagatgttccttattataataaaatgaaattgtaatactcttggattttgtgcagcacgaattctttatagagagttggtcctcccagagaattaagaatactcagtttctggaccctgttcccagatcataccctagaatgtgaccttagaaacacacttcaggattcatacctttgattgaccatcaaaaagtttttgtatcggccaggtgtggtggctcacgcctgtaatcccaccactttcggatgccacggcgggcagatcacgtgaggtcagcagtttgagaccagcctggccaacatggtgaaaccctgtctctacaaaaatacaaaaaatagccgggcgtgatggtgggcacctgtaattccagctactcgggaggctgaggcaggaggatcgcttgagcctaggaggtggaggctgcagtgagctgagatctgtctcactctgttgcccaggctggagtgcagtggcgcgatctcgactcactgcaacctccgcctctcaggcttaagtgattctcatgcctcagcctccgagtacctgggactacaggcacctgccaccacgcccagctattttttgtatttttagtagacatagggtttcactatgttgcccagctggtctcgaactcctgagctcaagtgatctgcccacctcggcctcccaaagtgttgggattaaaggcatgagtcaccgtgcctggtcccatgttataattttaaagtaaggtatatttctctacagggatctttgcaaccctaagtaactggcctaaaaagttagagaagctgacttgtgcagacatttgcagcctgttggtcttttttgtgctgtgaatcatagagggtgaaaggttattatgaatggtacaaaactttgttacaaaaccattttcttggactgttttgggctgcttcactgcatgacaaatgctcaccctttcagctggaatgattgaaattttggaaaagatgggtgtttttagaagacattgtaatttgttccggtgctgtgcccattcattccatttcacttctgtttactcattaaacacctattgtgtacacaacccggtaaaatccctccactcacacaatgcctgaattatactcatagtagaatgactgtttagccctcatcatctgataattaacagctcaggtttcaacctgacagtatctctctgggaggattagcagcgtgacagagtgcagggaaatgcaccttcagaaccgtcagctacactgtgtcccatcctgctgtgttgtggttgtgccttgtggatgcgttggtttatgaccaggtattgattaaggtggctactaccaggtgctttctgcatatctcgggtttgtggagcactcaggttctgcttctgcccctctgctgttaccaagagacctctcttcaaaatggggctcttgagttagagtagaatgagtgatcaggattgttttgtgtaaagatgatttctgaggaaggctttaggatgaaatgacttccaaacattttgaaatgtgactcttacttattgaattaagcagggccttaattggaatgctgggactgatacttgatttgcattaagcagcctttttctattgctgcttggttgaaatttcaacatttgtgatggtagatggatgtgacatgtgatgacattgcacatgggcagttaactgtgccaagaagtgcagcagtagcagcaaccggagatgcaaagcccaacatgatggggagagaaactcttctttcaatatgtgcttctgtaccaaaagtggaatttcacgagagacatattttgaaacatttctccttttgtgtgtgcgtgagtgtttccctgtttccagccaagggtattgtgagtttctcctgggcctccttcagaatctgggtgctctggaaagcagtgttttggcaacatggggaaagtatggcagtgtgggagggtcagctgggtctgggtttgaatattgcatttgaatattttaccagcattgatgtcggataaattatttagtccctgtaagcctcagttttctcttcttctacatacacataatatatttgactctttgttgtgattattggttacacatatgaagagcctggtgtggggcctggcacacaataggtgctcaataaatagaagttgataatttaattgacatgagtagtagaaattatgtccttgaaaacaattgcgtcaagatagaagttttcagccaggcacagtggctcacatctgttgtaatcccagcatattgtgggggccgaggcggatgaatcacttgaggccaggagttcaagaccagcctggccaacgtggtgaaatcccctctctactaaaaatacacatatttgccaggcaggcgtggtggcgcacacctgtaatcccagctactgaagaggctgaggcacaagaatcgcttgaacccaggaggtggaagttgcagtgagctgagatcactccactgcattccagccagcgtgacagagtgagactctgtctcagaaaaagaaaaaaaagatagaagttttcttctgtagatcagtgttagaactcataccaagcgaagtggtcctggtgagtatttcagtgaaaaactgcattcttgctcagatattgtcaagacttttcacccaaagattcttatttatgtctcagtccgtaccttgtgtgaaaattaatactggatgtcagaacgctgttgtgtttttaaagttccctggggttaagagcagtttccattaggtgttctctgctttttacttaaaaatcttactcatgcattgagcaatatttattcagttcttattatgtgtcaggtattttctaggagctggactcaactcaaaagatatccttttgatgagaacaaaggtgggtggatatatgaaatattatctgtgggataaatgcacttagtcatgagggagacttgttatggagtgcgctcattgtatttgtactgttgagttaacaacttctaggaggagctcagggccacctggcaggggcttcttttgtcttgctgctcagcaaggtgtattttgctgtagagtgtgctgggcaggtgaacttttcttaactttctcttgggtccttcctaaagcagcatgtacctttcccagagcgaggagagggccaccttcctgtctcacagaaacctccaatctgttttggactgcaggaaggagccatagtagtggaccagcaaattttggcccgagagattgatttgcttccgattgtactttttttttttattgctactataacaagtcaccaaatacttagcagtttataaccacatacatttattatttcataaggccagaagccaggatacagtagagctcacctaggtctacttcttagaggctcacagggctgatatcaaggtgtttgtggggctgtgtttttttgggggggctctgaagatgaatctgctttggagctcatccaggatatcagatgaattcagtcccgtgcagttgtaggactgaagtccatttccttgctggctgtcagcaggggctggtttttgctcctaaaggttgccatcattccttcttatgcttttcatgtgactcctctcccacaagtgggttgagtatctctcacactttaaacctctgacgcctcctgtcacatctgtctccagtcagagaaagttctttacttttaagggctcaggtgtttagtttgggcccattcacataatccaggataatctccttattttgaggttcataactttaattacatctacacagtgcatttgctatgaaatgtgcatattcacagactccaggaatagggtgtggacatctttgcaggggatattcagtctgctgtagctttcttgattggaaggaatagtttatcatatatttgaagtgttccctcagtgcctttggcttttgttgacccctctgcagctctctgctttttcttgcccatatttggaaagtgactctaaagcataataagcatcacctattagggtttttaatgtacaaaccaaacagaggtgactttgggaggagaacatctctgaactaggtatgagacattcatcgaaaaaaatccatcaagtgtttattgtatgtctgctttataccagcactgttctaggcactgaagttcgaccaccaacaaggcagttgtgatgcacttggagctttcattctgatgggcattgagatccaggctgaaggctgagtctgggaatttgaggaattctttgtaggtcctgggtctacagagtgagagctgtcctcgttccagtttcactgatgacctctcgaccagctccctcacagcagtctttgccaacacagacactgtgggctgtagtgggaggaatgtggggttgaatgagctaggtttgggctctgtccttgactcaccattgcctcagtgatgtgaaaatggtgtctgatccttaaggttggaagtccaggcatgcagatttatctccatctcaataacgtggggaaaaaaaagaagtggtttttgtggaaccagtggttccactgtccacgtgtcttccagtgtgcctagcacattcccaccaagtggatcttggttcatgagggaaagaagggaaagtgagggtgccccgaggctcccagaagacaagtaatgtcacagctgagctgtgtacagatcgaagaagcagatggataaggagtgaacaaagtcatccttgtcttgaggggtctttatttagcttcttcttgactcttagacaaggacccagaatacagatggggcttgttgttaccttcagcctcatggctttttagggctagatacttcagcttgttacatgcagtccttaaagcgtctgtgtgggtttttgcaggagagaacacttgctcgtgttctcctgtctggaacccggacattgttggaaagtatcagattttgtttggctttgtgtgatttgactgcccacctgtttacttgctttctcccagcaagcagccgcaatccccatgggttggtaatgggtggaatgacacactgtgtagatttactcttcagactctatgttcacctcattcttatgggaaaagaagagcactagctggtagatatagcagtgtgttaatatgactgctcaactccatttacacagacattttcaccttagttatactatttcttcattaaatattgttgccagatctaagatacaggtttaattttttcctctgaattatgtggtagtagatgtatttaactatgtttagaaacagcaaaaaatgaagcgtttgaatgcgttaaacacatctaatttgaaagttaatatttaggttgttgatttattttttaaaagattagaatattccttagaaatgtagtcttataatttcgtatttcaataaaaaatattaaaatgtttcccagaggaaatctttactgtcatagaaatcaccagaaagagatagcaattactcctgggtggtgatagtctttgatttgtggtttacttgttttcagtttgaactaaaacatactaatcccagcctgagttggattttgcatatggtcaaagtgaagtagagatttttgtctactttatgaagatatttaaaggacatttgaaatgtttcaatgaacacattgtaacatgcattcccaggaggaaaacaaaattgtgtattgtgttgaaaatactattccaatatatgtatacccacgtctcattttgtcatagaattcctgaaaaatttagatgtagatgagatttttataagttgaaaatattttcagttgcattttaattgcacagatgtgttttctacttctatttggctgtgactcctaatgcattgtaatattatcttccagtgttcatttcgtgtagtgataatggattaacaaatgcattcattcatttagtaaacatttactgagccctaatcagtgccatgctctggcccagggaggtagtcatgtgcaaggtccagccctctctgtttcattcctggttggggaatgggtgggacagaccaggaaaggagcagctgccgtatagagcaggagacgctctgctgggtgtgatacagtccctgatggggcctcctactgcagtctttccagtcaggaaggaaacatcctctaagtggggacctaaagaatggatgtcagccaggtaaagaacagggagtagaatgttccaggtagaggacatagtatatgcattggtccagagaggagagggaagagaaggtggcatttaggggaactgtacctgattgagatagttcagcatggagcagatatagctgtggggagtttgatgggagaaggaacgatgagacgtgatgcctgcagaggtgggcaaaggtcggctgaggcaggtctttcttcacgagccatgtgaggatatagggccttatcctcagagtaaagggagccattaaaggctccacaggctgagtgacttgatgaggtgaatacgaaacagagcatttctgtgaatgtgaatggcctttggagcagaactaagttcatgaggatggaaagaatataatgaagccatctcttagacccagaaagaatggggcacaacagcctttatctttctggggccaatgtcacagaatgccatgcttttaggaaacatggtatgttgtgattaacacattttgcagaagtgggtgggagcttttgaataataacagtaagcatttgtgcattcttcctgtaatgacattacagttatgatctgaaaatattgagtcatacatgaattcctgttatcttaactcagaaaatatagtccctcactaaaggttttattttccttctttttcccatttcctttacttcgtataagaaagtcacttgtctcctgggtgcaatggagacctatgtgagttcatagccaagagaatgtttttggttagaaaaataatagtaggaattccaagctgtgaattttttactgaagctctttggaaataggatttggcaagttttgtctgccttcgtcaagtaagcatgagcaggagagcacagttaatagcaggtgcagacacatgattctcagaccgtattttgtgttctagtttcaaggcatgaattctttcctggggttaattttattcaaggaagttatctgtctgttagatctgatatgtgctcaggccaacatagattctttacccttcctttcttcctgctcacctgtccttcctcttttatcttttcattgaattaaaaagaaaattatgaaatagtttcaacatgaaaaaaggtacagagaataacataaagaacactcctggctgggtgtggtggctcacgcctgcaatcccagcactttgggagtctgaggcagccagatcactggaggtcaggagttggagaccagcttggccaacatggtgaaacactgcctctactgaaaatacaagaattagccaggcatggtggcgtgcacttgtaatcccagctacgtgagagactgaggcaggagaattgcttgaacccaggagggggaggttgcagtgagctgagatcacaccactgcactctagcctgggtgacagagtgagactccgtcttcaaacaaacaaacaaacaaaaagaacactcctgtaccatcatccatcattttgccgtgctgactccaggttctatttaagaaataaaacattacaggtacagctgatgccacctctgtttccctagctcattcttcagagataactcttgtcttgcagttggatgttttaatcctctatatcatgtatacttacattctatgtataacaatatttggtactggcctaaatgtgttcacattgtataagtgtgcatattggcctgccacttcatttggaattatgttcttgagatttatcaatgttgatacatgtggaatctggttaatttttgccatagtattctatttttatactaaacttttaaaaatccatgcttctagtctttggcttattttttcaggttatggtatgttttggatgcacagaaaagtaaaattaagtcatgagcaaaatatctggataatccaagctttaaacttgatgtagaatttgaatcatgtgtgttttgttaaccctgtgatgtcaatccatgcctgattgtgtaactccaaccaatattcctttgaaaatggaaatttgtttatattgactacagattgccaatattattagtaaatgctgagcacttaatctcgaataaagaactagtttaaaaatgattctaacaatggcattgactgttctaccttattactcatgggtgggttcagccaatgtttctgttggagaccaaaaccaaaaacagtcaaattaaacaagcagtcaaacccaacatacagactactgataagaaggtcatatcataagatatggcattgaatttgtgtctgctaatgtaaaaatctgatgcccacagcaaacttaataaggacctatgtttacatccatgctcaattacattcctgggttaaacagtcatgctttaggccctgctgtgtgcctggagttttgctgaagtgtggggcttttaagagaaggagaataagcttgctccagagttaagaaatttaaactaaaagtcctaaagatgttggaaaaactattgcccttgaagatgtaaattcattaagttggagaagaccttttatacaaacaacagacccattcactgatttgtacccttcaggagacagatgaccggtaatggtgacaatgggtgaatgttgggtttggggtttttagaaacatctgcacttggtgactactgtatctaattggtgtgacaaacctggcaccccatgtgtttggcaccatcttgggtcctactcagggccaggtgaaccgagtggcctcttcactgcttcagagtctgaagcagattgtagtatgcggaccagacacagaatataccaccaagcacgttggcgcaaagcatactgggaagggaggctttgtgaacatggtgctggttctcaaacctcagtgctcaaaagagtctcctgaggattcctggatcacactcttaaacttctcattcagtaggtgttagctggttgagaatctgcatttttttttttttttctgagaccgagtctcactctgatgcccaggctggagtgtattggcgccatcttggctcactgcaacctctgcctcccaggttcaagcaattttcctgcctcagcctctctagtagctgggattacaagcacatgccaccatgcctggctaatttttgtacttttagtagagagggggtttcgccgtgttggccaggctcgtcttgaactcctgacctcaggtgatccacccactttggcttcccaaagtgttgagattacaggtgtgagccaccatgcccagcctgaatctgcatatttaacaagcaccacaggtgattctgatacagtagctccccaaacctcacagtgttagtgaatcccagtcatttacaattctgccatgattttggtcatattcaagtgcagctggtagcatttttagttaatatattttttaaattaagtcacttcttttggataattaaatttaattacaagggaagctataccactgctgtaaaaacatcacctgctttaaagagaaggtacataatgaatatacattaagataaagatgtatatgtgtgtgtgtgtgcacatataagtatacacatacctaccatagggattgagttttccttcaggtttttcaactgaaatgtcaactttgaggccagttaatatgtgtaagatatatgtgtgtatgtatgtctatacatatagacatatacgtaaaaacatacatggatgcatatagtatatctatacacaacctattatgcatatcatgtatatttcatccacttagtattatcttttattttgccgtttggcaaatgctcagtaaaagaaaagggttagaaggggagaaaggcattttatcccaagccttcaggaatcaggatgaggatgtcttcaccttgtggtggggagtaattatacaattagagacagcacattggagtgtggctgatatgctgtgtgatgatagctctagctctctgcctagcagaggaaggacatttcaatagaagaaaaagtttaagaccttgccgagaaacagagaaaggatgtttgtctttttaagaagttgaaaaccctgtttgcagacaaaagccctccagttttggcagtaaactttcatgcaagggaagaaaaaggcaggggatgacattgttgacaattgtgaggaattaccatgtgccaggcactgtgcgaggggctttgtacatatcctctagttttagtgcttataaaaactctgtgatatgtgcacagcattttaaactttgctgcatagtcgagaaaatggaaggatggggaatttgagtcatttgcccagggttctatagctaccccaggttcccatgactggagaattggggcacagggtggcgggggagagtgagtgacaagaatcctaacaatcttatttccattgagtccttataaaagaagtggattaactaccacgtttttaagtttttcttaaatttaggttatgtggatctggcgtttcttgttttgtcctgggtttgttttgtttttgctatgctgtcttgaacatctgtcatcttgtaggcctaacggtaaacacaaaaacactttacctcctatagctttcaattaagatctctcagtttgtgtttgtaatagttttccaggcaagttctccctaggttcggcttctagtgtgttaacctttagttataaagtgaacccaaagagagaaagtagaaacaaaacacctcacctgtttttgctcatgaattactctctatggaaggaacaatcatgaacacctctgcgtatcacagaggcctatctgagtctgacgtttaagggagaccgcgtaggtccctttgaggactgtgaatgtgggagtcctgggactctggtgaagaacccgttccagaagagatgaatgagctggacaagttctttcatagaacctttaggcaggttttcttagaaatgcacattgaggattatgcttggatattgtgatgatcagaatgatactcaatcccttctgcatttggaattctctttgaaagaaaacatcccaggcagctatttctcagagatagtgagtcccagccacttctagacattttcttgtgtagtctacattataatttcacagcagtctctgatatgacaaatgtcaaaatagcccaaccttctctaaacttcagagatgtctgatatgatattgaataaaacaatgctcatagaaacatcaagaaaggtggattttccctggatacttttttcctgcttgacaaataacagtgaagaaactgatctcacgtctttttctctttggaagcctgaacactcagaacccaacttgaggctcctcagctatagcaattctgacttcacagtctgtaaattattgttcttttttttctttagcttatgctttctgccctaatttatcttttccctgttctaatgaattattgtcctatatctgctgtgcagttaggtgacatataacagcaattaaatatatgaattggtacatataaagatttgactaaaactcgatgtaaaaataagtgttctacattcaatttccagtgttagaaacagtgctgacttgaacagagtgacagaattccatctttccctatttttgacagctttaaactttatattttcttcctttcttgtgagccgtcattaacttgtttctcaaagccattcccgtattacccatcttgcagacgcagacagatttgggaatttgcggtcagagttgtattggacacatccccccagcccacatgagatccttttaatctattgcatattaactagttttaagtacaatattcctacttcatttaaaaccattaatcaaagaatgagtttgaaaatgaacaaaatgcaaacttacagttagaaataattgtagtgtctttagttttggttaggagtcggtttcttgtttgttaaactcaagattgtgaacagttttaattcacttgtttatttccaatagagatttcaggtttacatttgaattcagaaacaaagttttctttctcattacagagaacactaaactctacatctcccttcccgagcaaggagctggctgaagccacaaaaacattgctgcatagtcttgggactctggcccaggaggtaagttgtgtctttccagtaccaggaagcggatcatccactgtatcagtattttcattcctgagtctggcaagaggtccttttgagttgaatatcacatgggatgtaatatcaattttcaaagtataagtgatgtaaacaataatgttttgatttccttattttagaaatgaagaaacctaaaactcatagatgtctcagagctaattggttagtggctaacagctggatatctagtttagaaccttctccattttttctttttgcccctaggtaatcatacatttgtaaagaggagaattatctctgccactgcccatgcactgcttttgtctgaccagcaatttctccatattgcttcttcagtagcaaggccaatcattttaccaacacacatgcttgctaactaacaggaataacgtggtacccctaattcagccctttcccttgaaagcatctggcttctgaggttcaactatgggaatatggtctcttaatgaacattaagttgagtttgccttttaggtccacatgttgacaaatgtatcagagtaatctctgtcctaggatcagagggcctgtaggcacttgcaaaagcagttagctctgactcccagccagtgcacactccacctttctgactcccagccttgtctcaaattaggcttggaagcgaggaactgtctggtgtcccccagcataggaagctgagccagggggcagtgctcacaaacaatacagactttaacgtgtaggatattggaaaataataatttgtggggaaattgtctcagacttggtccacccttatttttagctgcttctctaatccgtttttctttttttggtgcttgtatctaacctacccattttttggtgcttgcatcattttttcaaatatcaaaaacgaactttatgttttctaacaatgaaagtattgcatgttcattgtggaaaatgctgaagacttggaaaatacaaaaatgctgagatcaaacactattgatacgttagtgtatttcttcctgtcctgttctactttctttctttgaattctgctcacgtgtttctgactgatgaggtctgacttttgggttccttttccagaggagaagccttctttcagcttgccatttgttaccctggttatgaaggctggtaaccttttttactaggtagagaagctggaccaactggggttcttccagggggagaatgagaaagagaaactgttttgcaagtccgtagctatttctctagggccctgttagctgacattgacatgccttgcattgctctgcagatcccctcgcagccctctgtcccttgttcatttctggccttagagaaagcaaagcagggtctgtaacaggggaggctgcctctaaactcagggtttggttacagctgttttcacttacatcactggccctggttttttttttttttctggcattaaaaaaaaaaattggaagcaggtgatgttcccattgctgatgtggtggaaactctccaagtgaacaatatacgtttttcttggcagctgtttcttgtgccctgcttgctcctggtccaggacaagcaaggaccatctgcctctttcaatagaacacctccagatccctttgatcaaaagttactcattgtctgacttgctatttctgtgagataaatgggagaagatcaataaatgcacttgtttgtccagtcagcgtgtggaaagttgataattttgaccaaagcacaacccttgaaaggaaaagaaaaagggagtgaatgtcttctgagaagctgcctaggttcagacagtgtcacccatttccctgtatgctccacatgacaaacctgagtgggtctcatcatgtccattttgcagatggcaccaaggctcagaaaggttaggcaacttttccagtcacccaatgagttaattgacaaaactgggattcaaacccagaactgttggattccaaagcctgtgttgttgcctgcttcgtgaaaaactccagtagcgactggaatagaaaggagaaccttccaagaaagaaaatacgcactagcagaacctggaaattgggaggaaatgaggacttgaggaataagatgaatgaaagctgacctgagtttcacatctgggtgatgggaagggaggacagggaggcagcatctcagatgtccacccagcaccgaccagctgcctggcattgctaggtgttgaggactcagcagtgaacacgctaacttctctgctttcttggggcacgtatagggtgagagacagaaacaaacaggtcagtgtacaatgccacaggagggatatatgcagtgaagaaaaagcagggtaaggggcatagagcatgagaaggtgctttttttaaagggggtgattaggaaagctctctctaaggtgacagttggacctgaaggagatgatagcatgtctgtggtgagggaaggaaactccgaacaggaagaatggcagatacaaagacattgatgctagagcatgcctaaggaatgtgtttaaggaccagggaaagtgagcaagtggtggggggaggagaggagctcagagcaggaggaggtgagtgccatacaggcctggcaagactttggattcctgctgggtgagatgagaatccagcggagggcttgagggaggggacatgatgtgatctagagtttagactgtttacactctggttgttgggttgagaagagactgggatgggggaaagggaggacaaaggacattgtgctggattgagaaagcagtaagtcagtttcattcattcactcaaccgatgatgttcaaataccaccatcatccgtgggctaaaggatgaagagccatccctccctgagagtcaggaagcacttcccagataaagtttggagtgtgagctgaggtgtaggagaaagagtaagagtttacccctgaaacgggtgctgggaagagtcaatagtttggaataactcaataatttatggtgcttctttagaaagatttgctggctttatgtgggaagaaatttttttttttgattggggagtggtgggttggtggtgaggctgcctgtggaaagagaagtgagtgttttgactcactgttatttaaaaatctctagggctgttccaataagcaacaaaaggcaaaatggcctggttctctgtcccctttctgtctgtatgcctcgtacaggttatgaaaagaaaaagttgggaaaagctgtccacctcacctaattgtgttcttgtggagtgtgctagatgccccctctctggagaaaaaaaatccttgtggcctctgacccacctctggagagcctagttcccttctggaggcagaaggcaaagcttaggacctagagagtgctggaccacgccactcacaggaaccagcaggctgtgaggttgaaagctaggcatatggagctttccaggctgggtgcagggcctcgtggcccttcccctcccctctgtgctctatagctcagtcttcccaggcggtgtgaacacgcagtgacatttccaggaatacagggatttattaatgatttcttgtgaaatgtttggaaatacaaagtactctataaatatttcataatagcattggggctgagaactccacaaagtgccggaatacatttgcatgtaagacagaacgctgcctgggtcattgatgcctgttgagtggcagtcacagacactgcctagggtttctgactcacgctgttgggactgttctatgcagggcaccctcttgtgtggcataggatttgtgcctcaccacacactgttgtagctttgctgtcttgatgatgagtagagggcagtgtccaggccatggtataagcatctactgccccccagggttaccaaaaccaagccaagttgtgtctcagcgagctccgtgaagcatggagaagttgagtactcagagacatgacgtgacttttcaaaggctgtaagctgacgagggacatagctagggttcagacttgagtttttctttttctttttctttttcttttttttttaagactgagtcttgcttttgtcgcccaggctggattgcagtggtgcttggctcactgcaacctctgcctcccgggttcaagcaattctcctgcctcagcctccccagtagctgggattacaggcacctgccaccatgcctggccaacatttttgtatttttttagtagagatggggtttcaccatgttggccaggctggtcttgaactcctgacctcaggtgatccacccgcctcgacctcccaaagtactgggattacaggtgtgagccactgcacccggcccagactcgagtttttcatcttaatgctttttcattgcctgacactttactgagaccaagatagggaacttcacatacagtaccttttctcccaaggcggaagagggctgttcaatttctacactagagttcggggagttttagaaatgagtcagttatcgaggatgagagcagttcctgataggctcaaccacaatgagatgtagctgttcagagaaagcattcttttatctataaactggaagataatcccggtgaaacgaagcccagccccaggggcttcactaactccaggctgtgcttctcaaactttagtgagcataggaatcacctgggcatcttgtgaagctgtagatttgaattctgcaggtcggcagaggggtctcagaatccgcatttccaacaatgtctccagtaatgctgatgctgctcgtccctggaccacagattgggtagccaggttctggcaagctcatcccaaggctttgagatgacatcagacaaaatatgttctgggacatggcttttgagaggtcaagaaaataagatgtttctttctcttctcatccccaacccttgcactgcccttttctcccttcccctaccctcctttctgtccccatccctgacgccagctgttcagcatgagaagctggagtgacatgcgacaggaggtgatgtttctgaccaatgtgaacagctccagctcctccacccaaatctaccaggctgtgtctcgtattgtctgcgggcatcccgagggaggggggctgaagatcaagtctctcaactggtatgaggacaacaactacaaagccctctttggaggcaatggcactgaggaagatgctgaaaccttctatgacaactctacaagtgagtgtccatgcagaccccagccctgtccccaaccccatccctcccttagttctggccttggcctgtgtcatctcctccctctgtagcagcgttagatgtctacatgcccatttgcccaccagactgagctcttcctagaggagagaggcttctcttgaatagctacctgtccccagttctctgaatgcagcctggcacatctcaggtgcacagtagtgtttatcaatggaatgaatgattgacagccaaccttctggttttctgggggatgtggaagggtggcttccagggtgatcaagaatgagataatggcagaaggacaaatcctgcaagatctcacttatatatggaatatatgtaaggtagaaagtgtcagtttcacatgatgaataagttcctgggatcttgatgtacatcgtgatgactatagttagtaacactgtatagtatacttgaaatttgctaagagagtagatccgaagtgttcacactacacaaaaaaggcaactatgaggtgatggatttattaacagcttgattgtggtgatccttttacaaagtatacatatattaaaacatcacattgtataccttaaatatatacaatttttatttgtcagttgtaactcaaaaaagctagaaaagcatttttaaaaaggatgatgtactggtcttaatattaccattgagataagctttataataacataaaaagaaataacagtaatgataatagcaacaacaacaacaacaaagaactaacatttaagtagaatttcttgtgcactgtgcattctgtttaagttatctcattttaccctcatgataaccctgcagggaagattctttaaccccacatttcataggctcagagaggttaagtgccttggttagagccacatcagagttaatccacaagagccaggattcaagcccaaatctgcctggatctgtgctctctaagataactgttagtggtggcgtgtgtgttctcacactcagacatttgatctgccctttgtttcccattcttagctgcaaggcagtgttaaagaaccctgtgtctccatatccactccccacacttaagcacttttgtgggcccgtgtgccgtatgcctcgtggcagcagggatccaatgtcacagttttaggcagtggcatccttttccttgaaaacttgatgcaggggaacctttctccatttccaaccacaggtgtgtctttcagacactgagtgaggcaggttttgtactttattgtaacacaagaaccttttcttctctggagtaaagcactccagacattcgcaagttgctttacaagccttaaaaggatggtattgtaggcaactttaattaaatcccatctcctcctctcccccagcttgcaagttgacccaaggaagccttcatttccatgacagacttaattgtgagggcatcctcattaaaaaaaaaaaaattctattatctttccagcatatagaagatacttggtatctaaaaatccctgaaaaacttagaatgaatttttaaaaatcagggatcctgctggataaccaaacccatttgtctgttacaacttttgtatttgggtttttgttaagtgtacatatactagtttgtgttaattaaagagaatttttttttttttttttgagagggagtctcgctccgttgcccaggctggagtgcagtggcgccatctcggctcactgcaagctccgcctcccgggttcacgccattctcctgcctcagcctcctgagtagctggaactgcaggtgcccgccaccatgcccagctaattttttttttttttgtattttgagtagagacggggtttcactgtgttagccaggatggtctcgatctcctgacctcgtgatccgcctgtctcggcctcccaaagtgctgggattacaggcgtgaaccactgcgccctgttgagaatttttttttttttttttgggagacagagtttcgctcttgttgcccgggctagagtgcagtgacacaatctcggctcactgcaacctctgcctcctgggttcaagcgattctcctgcctcagcctcatgcgtcaccacgcccagctaattttgtatttttagtagagacagggtttctccatgttggtcaggctggtctcgaactcccaacctcaggtggttcgcccgccttggcctcccaaagtgctgggattgcaggcatgagccactgcgcccagccccaaattttggtttttgcttgaaaactgaggtctgaattcagccttctggttgcccctcaagagtcagtttaaatgttggtcatgttagttgtcagtgaaaacaatggtgaggctggcatgagagtgtgaatctggatgggagggcttgtgcttcatgaaaacatttttccagatcagctcagtcgtgagttatccgtcattgacgttataataagctctgattatttatcaagcatcattctttatagatatctcagtttaatctgagataatcttctccacatctctccacatagatgttatgaattttacttttacagaggagccaactgaggctcagataagttacttattatatgactagtagtggtagagctggggtttcaactaagaactctctggctccaaagcccttgtaagtttctatcagtatatgaccatgcatatgagcatttgtctctcctcttcttcatagctccttactgcaatgatttgatgaagaatttggagtctagtcctctttcccgcattatctggaaagctctgaagccgctgctcgttgggaagatcctgtatacacctgacactccagccacaaggcaggtcatggctgaggtaagctgcccccagcccaagactccctccccagaatctccccagaactgggggcaaaaaactcaaggtagcttcagaggtgtgcgctaagtatactcacggctcttctggaattcccagagtgaaaacctcaagtctgatgcagaccagagctgggccagctccccagtcgtgggtatagaatcatagttacaagcaggcatttcttggggatggggaggactggcacagggctgctgtgatggggtatcttttcagggaggagccaaacgctcattgtctgtgcttctcctcctttttctgcggtccctggctccccacctgactccaggtgaacaagaccttccaggaactggctgtgttccatgatctggaaggcatgtgggaggaactcagccccaagatctggaccttcatggagaacagccaagaaatggaccttgtccgggtgagtgtccctcccattattaccatgtgcctgcttgatactggagaggtgagtttctggtcactttcccaggtgtgagtgaggtgagaattctttcagtttatctagctgggggaatgtagtgagcatagctaaagtcacagggcaccacctctccagaagtacaggccatggtgcagagataacgctgtgcatatcagcatccatgccactcacggtcaaatagcagttttctgcaaaacttagtgagggctggtgtttggaagtggagttgagtaattgcagtaccctattttcctttttggctgcagcctctcagccagccacagcatctccctgtgtcttggtaggttttggaaagaagtgtgggagcaaaagcatgatgttacatgtagactggcctgagatactcattctcagggcactgtgtgaatgatgagctgctgttactgtgtggaggggaaatgcacttagtgcttcagagccacttgaaagggataagtgctctagagacaattgggttcaaatgtggagcaggctgagcaagaacagaatgtctcctttgcctgagcctgagtgctgttaatcacatcttcctgccttgggctgagttagagaatcattagactatttcctgtttccatggtgagggaggcctcttccttttgtctctgctccccttaagaagcaggtgaggattttgccaggtttcttgttttgaaccttattgactttaagggcggctgggttttagagactgtacctacctagggggaacacttccgaagtttaggactattccctgatccgctgggaggcaggttactgaggaagtccctttaaaaacaaaggagtttatactgagaaaagcataaacagtgatttgtatggattcacactgactaatatagctcatgccattaaagtggggtctcttctctaaaggagggttatatgatctagccccgtagacctaagtgtggtttcagacctgttcttcctggtcctctccttggaatccatatttctactagttggactttttctgtttgtctggctctcagaggattataggaggccctgtgaagtgactcagtgaattttgatttgtgggcaagtagatggttccctagtctgaaattgactttgccttaggtgcttcaattcttcataagctcccagttcttaaaggacaagatccttgtaaacatggcaatggcattcattaggaatctagctgggaaaatccagtgtgtatgcttggaaatgagggatctggggctggagagaaaggcatgggcatgccttggagggacttgtgtgtcaagctgaggacctttactttaagctctaggggaccaggcaaggggagatgtagatacgttactctgatggggtggatgaattgaagaaggatgaggcaagaatgaaggcagagaccagggaggaggctctccaagtggccaaggcataaagcaagaaatgaggcctggtgactgcttagtggcagagcagtgaaagagagggaggcatcaaagtgagtctcgatttctagctgggtgggtggtagcgatgtccagtaggccagtggctactgaggtctgcagtggaggagggtggttgggctggagacagatgatgagggagtcatcagcctgtgggtggaagaaaagggaacctcttccaactgttttctttgcttcttccctctctttctctttttttttttttttggacagagtcttgctctgtcacccaggctgaaatgcagtggcatgatcttggctcaccacagcctccgcctcctgggttcaagcaattctcctgtctcagcctccagagtagctgggattacaggcacatatcactgtgcccggctaatttttgtattttcagtggagatgggatttcaccatgttggtcgggctggaatgaactcctgacctcaagtgatccacctgcctcagcctcccaaagtgttgggattacaggcatgagccaccgcgcccggcctttcttccctctcttaaagagtgtttatttaattccacaaacatgagcttgtcaccccctgtagcctggcatctcctacacgaggtgatggctgaggcttctgcttctgctggggtagctctgatctttctgctttctctggcactgtctacccatgttgcctcaccccacaggtcccagggcacctctctcgggcaagtcttggaaccctctgacactgatttgctctcttttctgagctgcttttagccacccatcctcgggacctgttttctctctgcctccacccctgcgggcagtcttaggtctcctgcccctcacgagcaccccagagaggccacgtgctcagtgatctcagtgggcgcatctttctagtcttgctattctttttggccatgttgttcagaaaccatactgggcagggccgacttcaccctaaaggctgcgtctcttcactctgcttttgtttgttccaaataaagtggcttcagaattgctaaccctagcctctgtgaacttgtgaggtacaattttgtgtctgttatgttaacaaaaatacatacataccttcctggtgatggtataaattgctattctctattggaaagcaatttggaatgaaaatttaaagaaccattttaaaatatgctatcctgcgtacctccattccacccacccccagggatgtagcctactgaaataattttaaagaagtcaccatatgagagaaaatgttattgctatattgttattgtgagaaattggaaatagactaaatgttcagcactataggaataattaatgaaattacatatactctatacaatcattatgctgccattgaaataataaatacaaaggcgcaaggggggaaaagcttataatgttagtgaaactaagactgatttttttataaagcagcagttttcagacccttggagactccaattcggtagaaccagagcttcatcttctctgtcgaagctgtgacaggagttgcaaatgcctctcctttttgctgagtttgcagctgctgtttttccggcagcacatctgtgcaggcctctgcctcggcccctctggatctgctgattgagcagcggattgatctgtccttctctttcgtgttgacccatgtgaggaaccaactggcaagggaacaagaaatggaaataggcctcctttgcatcatgacctgtacatcctgcaattggaaaagattgtactttagttggtttaaccagcagcattatttttctaaactaagcagtaagaaggaattaggttttatgtgggatcaacagactgggtctcaaaagaggaaggtgatagaacacagtggggagggggaggtgcactagaaacagagggcctatgctttcattctggctttgctacttaatagctgtgtgacccaatcttagagacttaacctctctgaacttccattttctcatgtataaaatgggaaatattaaaggatactcactgggctggtggcttgtgcctgtaatcccagcacttggggaggttgaggtgggaggatcacttgagcccaggtgttcaagaccagcccaggcaacatggcaagactctgtctctatgaaaaaattaaaaattagccaggtgtggtggtgtgcacctgtagtcttagctacttggtaggctgagatgggaggatcacttgggcttgggaggtcaaggctgcggtgagctgtgattccatcactgcactccagcccgggcggcagagcgagacactgaatccaaacgacaacaacaacaaaaggcaaaaaaataaaagtgccctctttatggagttgtgtaaggtgaagcatatacactattcaacatagtaactatataaaggaagtattgttgttgttactgtagttaataccattaagtgagatgtttcgtatagtggaaagcacatggactctgaattcagactggtctgactttgagtctcagctccacatctagtaatactatgaccaagccctggttaaaatcatgtttttttttcttcagcctcagtcttctcacatataaaatagggacactgtcatttacctcagttttctgtgaggataaaacaacgacagtgtatatgcaagtattttgtaaattttgtagtgctcctcaagatttagttggtgtttactacttgtactttctcactggaatggcagatgctgttggacagcagggacaatgaccacttttgggaacagcagttggatggcttagattggacagcccaagacatcgtggcgtttttggccaagcacccagaggatgtccagtccagtaatggttctgtgtacacctggagagaagctttcaacgagactaaccaggcaatccggaccatatctcgcttcatggaggtgaatctgttgctgggatcatttagaaaagacttaacggcttctttctctgagacgttacaataaggttcaggcaggaggcaagtttagaaataatgtatagtctcatttacaaaactatccctcaagcctaacacaggatttgataacaaaaggcacttaataaatgttagttgagtggttgaatgagtaaataaactctagctttagtaaattaactctagcttattctatataggctcaagagaatatttctacccattttcttctaggttttcctatctcagtgactaatggtagcaaagcattcccttaaaaaggcattatttgtgaaacttatctaaaatcgaattcgggtccaattaaatttttgaaattttatattaaaaattatattagtagggatgggtaagaggtgttttggtctggttggttggttagttgctatgactcagaattgctaagaaaacagaaaagtaagataagatcattgttttaacctcttttcctccacaaaatcaataaataacatatccctaaattactcttagaatttctcttaaattgcagtgaaaaaccaaaatccttcattcttggttgaaggttggaaaactacgttagagaggattagagagagaggatgagcaatcgtgtagtcagcccttgcctcctagtgtaggatttgtctcagccactgcttgttgtcctggctgccaacgttctcatgaaggctgttcttctatcagtgtgtcaacctgaacaagctagaacccatagcaacagaagtctggctcatcaacaagtccatggagctgctggatgagaggaagttctgggctggtattgtgttcactggaattactccaggcagcattgagctgccccatcatgtcaagtacaagatccgaatggacattgacaatgtggagaggacaaataaaatcaaggatgggtaagtggaatcccatcacaccagcctggtcttggggaggtccagagcacctattatattaggacaagaggtactttattttaactaaaaatttggtagaaatttcaacaacaacaaaaaaactcaacttggtgtcatgattttggtgaaattggtacatgacttgctggaaggtttttcataggtcataaaataacagtatcttttgatttagcatttctactcaagggaattaattccaggaattttggtggcaggcacctgtaatcccagctactcgggaggctgaggcaggagaattgcttgaacccaggaggcagaggttgcagtgagctaagatcgcatcattgcactcccgcctgggcaataagagtgaaactccatctcaaaaaaaaaaaaagatacaaaaatagaaaaaggggcttggtaagggtagtagggttttgggcaatttttttttttttttttttttattgtatggttctaaaggaatggttgattacctgtggtttggttttaggtactgggaccctggtcctcgagctgacccctttgaggacatgcggtacgtctgggggggcttcgcctacttgcaggatgtggtggagcaggcaatcatcagggtgctgacgggcaccgagaagaaaactggtgtctatatgcaacagatgccctatccctgttacgttgatgacatgtaagttacctgcaagccactgtttttaaccagtttatactgtgccagatgggggtgtatatatgtgtgtgcatgtgcatgcatgtgtgaatgatctggaaataagatgccagatgtaagttgtcaacagttgcagccacatgacagacatagatatatgtgcacacactagtaaacctctttccttctcatccatggttgccacttttatctttttatttttatttttttttttgagatggagtctcgctctgacgcccaggctggagtgcagtggctcgatctcggctcactgcaacctttgcctcccgggttcaagctattctcctgcctcagcctccacagtagctgggactacaggctcatgctgccacgcccggctgactttttgtattttagtagagacgaggtttcaccatgttacccaggctagacttcaactcctgagctcaggcaatccaccctccttggcctcccaaagtgctgggattacaggtgtgagccactgcacccagcccaccactttaattttttacactctacccttttggtcaaaatttgctcaatctgcaagcttaaaatgtgtcatgacaaacacatgcaagcacatactcacacatagatgcagaaacagcgtctaaacttataaaagcacagtttatgtaaatgtgtgcacttcttctccctaggtggtaaaccacatttcaaaacaacccaaataaaactgaacaaagcttcttcctcttagactttttagaaaatctttcagtgctgagtcactaagctgccaagttctcattgtgggaactatgcctttggatgtaatgatttcttctaagacaatgggcggaggtgtagttattgcagacatctgaaatatgtaatgtttcttccagattctggaaattctcttattctctgtggttggtggtggtggtgggatgtgtgtgtgtgtgtgtgtgtgtgtgtgtgtgtgtgtgtagggatcaggatgcgggaggagctgggttctgcttgtattggttctctgttttgcattgaatagtgtgtttccttgtatggctatctatagcttttcaaggtcaccagaaattatcctgtttttcaccttctaaacaattagctggaatttttcaaaggaagacttttacaaagacccctaagctaaggtttactctagaaaggatgtcttaagacagggcacaggagttcagaggcattaagagctggtgcctgttgtcatgtagtgagtatgtgcctacatggtaaagctttgacgtgaacctcaagttcagggtccaaaatctgtgtgcctttttactttgcacatctgcattttctattctagcttggaatctgaaacattgacaagagctgcctgaaatgtatgtctgtggtgtgattagagttacgataagcaagtcaatagtgagatgaccttggagatgttgaacttttgtgagagaatgagttgtttttttgttttggtttttagtactttaacataatctacctttagtttaagtatcgctcacagttacctagttactgaagcaagcccccaaagaaatttggtttggcaacactttgttagcctcgtttttctctctacattgcattgctcgtgaagcattggatcatacgtacatttcagagtctagagggcctgtccttctgtggcccagatgtggtgctccctctagcatgcaggctcagaggccttggcccatcaccctggctcacgtgtgtctttctttctccccttgtccttccttggggcctccagctttctgcgggtgatgagccggtcaatgcccctcttcatgacgctggcctggatttactcagtggctgtgatcatcaagggcatcgtgtatgagaaggaggcacggctgaaagagaccatgcggatcatgggcctggacaacagcatcctctggtttagctggttcattagtagcctcattcctcttcttgtgagcgctggcctgctagtggtcatcctgaaggtaaggcagcctcactcgctcttccctgccaggaaactccgaaatagctcaacacgggctaagggaggagaagaagaaaaaaaatccaagcctctggtagagaaggggtcatacctgtcatttcctgcaatttcatccatttatagttggggaaagtgaggcccagagaggggcagtgacttgcccaaggtcaacccagccgggtagcagctaagtaggatgagagtgcagggttcatgctttccagataaccacatgctcaactgtgccatgctgtctcattggtagtggttcatggcagcatctgaaagctatttattttcttagatatattgggtggcgattcttcctaagtttctaagaacaataatcagaaggatatatattgttgcaggttagactgtctggaagcagaggctgaaatagagtttgatgtatgggtatttatgagggctcaatacctatggaagagatatggaagatgcaggattgggcagagggaggagttgaactgtgatatagggccaaccccgtggggcactctagagaatatgcagcttgttggagttgttcttcatcgagctgaaacatccagccctttgtgctcccccaaggcctccctcctgacaccacctacctcagccctctcaatcaatcactggatgtgggctgccctgggaaggtcgtgccccagggcctacatggctctctgctgctgtgacaaacccagagttgctgatgcctgaggccgtctactgacagctgggcaacaaggcttccctgaatggggactctgggcagtgcagttttgtgtctgaaccatacattaatatatttatatccgaattttctttctctgcaagcatttcatataaagacacatcaggtaaaaataaatgtttttgaagcaaaaggagtacaaagagataagaactaactaatttaatactagttaccatctgttacaaatagttcctactgattgccaaggactgtttaaacacatcacatgggcttcttcttctatcctcactaacccttttaacagacaaggaaatgaggctcaggaaggtcaaggactttattgaggttccacagtaggatacagttcttgctaaaagcaacccctccctcatgctctgttatctaactgcaaggggaaggtcagtggcagaggtagtggtcccatggttggtgcataagagctgctctgagacaactgcatgctggtgggtcctgcagacatgtacccatcagccggagataggctcaaaatatccacaagagtttggatgattgtgggaatgcagaatccatggtgatcaagagggaaagtcaagttgcctggccattttccttggcttttagacagaaaagttacgtgggatattatctcccacagctcttctgtggtgccaccagtcatagtccttatataaggagaaaccagttgaaattacctattgaagaaacaaagagcaaactcgcccactgaaatgcgtagaaagccctggactctgttgtattcataactctgccattatttttctgcgtagttttgggtaagtcacttatcttctttaggatggtaatgatcagttgcctcatcagaaagatgaacagcattacgcctctgcattgtctctaacatgagtaggaataaaccctgtcttttttctgtagatcatacaagtgagtgcttgggattgttgaggcagcacatttgatgtgtctcttccttcccagttaggaaacctgctgccctacagtgatcccagcgtggtgtttgtcttcctgtccgtgtttgctgtggtgacaatcctgcagtgcttcctgattagcacactcttctccagagccaacctggcagcagcctgtgggggcatcatctacttcacgctgtacctgccctacgtcctgtgtgtggcatggcaggactacgtgggcttcacactcaagatcttcgctgtgagtacctctggcctttcttcagtggctgtaggcatttgaccttcctttggagtccctgaataaaagcagcaagttgagaacagaagatgattgtcttttccaatgggacatgaaccttagctctagattctaagctctttaagggtaagggcaagcattgtgttttattaaattgtttacctttagtcttctcagtgaatcctggttgaattgaattgaatggaatttttccgagagccagactgcatcttgaactgggctggggataaatggcattgaggaatggcttcaggcaacagatgccatctctgccctttatctcccagctctgttggctatgttaagctcatgacaaagccaaggccacaaatagaactgaaaactcttgatgtcagagatgacctctcttgtcttccttgtgtccagtatggtgttttgcttgagtaatgttttctgaactaagcacaactgaggagcaggtgcctcatcccacaaattcctgacttggacacttccttccctcgtacagagcagggggatatcttggagagtgtgtgagcccctacaagtgcaagttgtcagatgtccccaggtcacttatcaggaaagctaagagtgactcataggatgctcctgttgcctcagtctgggcttcataggcatcagcagccccaaacaggcacctctgatcctgagccatccttggctgagcagggagcctcagaagactgtgggtatgcgcatgtgtgtgggggaacaggattgctgagccttggggcatctttggaaacataaagttttaaaagttttatgcttcactgtatatgcatttctgaaatgtttgtatataatgagtggttacaaatggaatcattttatatgttacttggtagcccaccactcccctaaagggactctataggtaaatactacttctgcaccttatgattgatccattttgcaaattcaaatttctccaggtataatttacactagaagagatagaaaaatgagactgaccaggaaatggataggtgactttgcctgtttctcacagagcctgctgtctcctgtggcttttgggtttggctgtgagtactttgccctttttgaggagcagggcattggagtgcagtgggacaacctgtttgagagtcctgtggaggaagatggcttcaatctcaccacttcggtctccatgatgctgtttgacaccttcctctatggggtgatgacctggtacattgaggctgtctttccaggtacactgctttgggcatctgtttggaaaatatgacttctagctgatgtcctttctttgtgctagaatctctgcagtgcatgggcttccctgggaagtggtttgggctatagatctatagtaaacagatagtccaaggacaggcagctgatgctgaaagtacaattgtcactacttgtacagcacttgtttcttgaaaactgtgtgccaggcagcatgcaaaatgttttatacacattgcttcatttaattctcacaaggctactctgaagtagttactataataaccagcaattttcaaatgagagaactgtgactcaaagacgttaagtaaccagctttggtcacacaactgttaaatgttggtacgtggaggtgaatccacttcggttacactgggtcaataagcccaggcgaatcctcccaatgctcacccaattctgtatttctgtgtcctcagagggggtacaactaggagaggttctgtttcctgagtacaggttgttaataattaaatatactagctctaaggcctgcctgtgatttaattagcattcaataaaaattcatgttgaatttttctttagtacttctttcttaatataatacatcttcttgaccaagtccaagaggaacctgcgttggacagttttcatatgagatcaaattctgagagagcaagatttaaccctttttggttcaccttctgatcctcccctaaggaggtatacatgaaatatttattactcctgcctgaacttctttcattgaatatgcaattttgcagcatgcagattctggatttaaattctgagtcttaacttactggctgagggaccttggataggctccttatccctcagtttcctcatctctaaaatggggatggcacctgccccgtgggttgttggaaggacttacagaggtgcagaatgtacgttgtacatagcaggtttcagcaaatgttagctccctctttccccacatccattcaaatctgttccttctccaaaggatgtgtcaaggaggaaatggacctggctgggaaaccctcagaatactgggatgatgctgagcttggctcatacctgtgctttgctttcaggccagtacggaattcccaggccctggtattttccttgcaccaagtcctactggtttggcgaggaaagtgatgagaagagccaccctggttccaaccagaagagaatatcagaaagtaagtgctgttgacctcctgctctttctttaacctagtgctgctgcctctgctaactgttgggggcaagcgatgtctcctgcctttctaaaagactgtgaaaccactccaggggcagagaaatcacatgcagtgtccctttccaaatcctcccatgccatttatgtccaatgctgttgacctattgggagttcacggtctcgatccctgagggacattttctttgttgtcttggcttctagaagagtatcttttacttgccccctcccaaacacacatttcatggtctcctaacaagctagaagaaagaggtaaagacaagcgtgattgtggaaccatagcctcgctgcctgcctgtgacatggtgacctgtgtatcagcctgtgtgggctgagaccaagtggctaccacagagctcagcctatgcttcataatgtaatcattacccagatccctaatcctctcttggctcttaactgcagacagagatgtccacagctcatcaaaggctctgccttctgggttctttgtgcttagagtggcttcctaaatatttaataggtcccttttctgccagtctcttctgtgcccatcccctgattgcccttggtaaaagtatgatgccccttagtgtagcacgcttgcctgctgttcctaatcatcttctcctacctcctctttacacctagctcctgtttcagtcacctagaaatgctcacagtcgctggaatatgtcatgttcttccacacctccatgcctttgtaggtactgtttgctctcacaggagaactttctctctaacttgcctatcttctcaactcctcctttctctccaagatctagttccggatcccctcccctgagcatccctccttggttctcaggtagtcagtcactctctgccctgaacttccatggcacgtgaaagaaaatctttttattttaaaacaattacagactcacaagaagtaatacaaattacatgagggggttcccttaaacctttcatccagtttccccaatggtagcagcatgtgtaactgtagaatagtatcaaaaccatgaaattgacataggtacaattcacaaaccttcttcagatttcactagctttatgtgcgctcatttgtgtgtgtgtgtgcgtatttagttctatgcaattttatcatgtgtgaattcatgtaattactagctcagtcaagctgcagaaatatctcattgtcacaaagctccttcatgctaccccttaatggccacagccacctcccttcttcctcagttcctgacacctgtcaaccactaatgcgttcctcgtttttacagttttattatttctagaatgttacataaatggaaccatacagtaggtatccttttgatactggctttttttttttttcactcagcagtattcccttagatctatccaagttgtgtgtgtcaacagttcattcctcttcactgctgagtagtgttccctgggaggggtgtatcacagttccatggcatttttagatgtattttttaaacagctttcagcatcctctattttaattgttcatcaagtcctttttcccaatagactctgaatgctcctttatcatcgtattcccatcaccaacatcagtacccaaataggccctaaataaacatttatagcctcctgcctgcctgagaaaccagggtggacatggagagaaggcacttctgaaagttcaagcgcagtgccctgtgtccttacactccactcctcagtgctttctgtgggttcatttctgtcttctctcctgtcacagtctgcatggaggaggaacccacccacttgaagctgggcgtgtccattcagaacctggtaaaagtctaccgagatgggatgaaggtggctgtcgatggcctggcactgaatttttatgagggccagatcacctccttcctgggccacaatggagcggggaagacgaccaccatgtaagaagagggtgtggttcccgcagaatcagccacaggagggttctgcagtagagttagaaatttataccttaggaaaccatgctgatccctgggccaagggaaggagcacatgaggagttgccgaatgtgaacatgttatctaatcatgagtgtctttccacgtgctagtttgctagatgttatttcttcagcctaaaacaagctggggcctcagatgacctttcccatgtagttcacagaattctgcagtggtcttggaacctgcagccacgaaaagatagattacatatgttggagggagttggtaattcccaggaactctgtctctaagcagatgtgagaagcacctgtgagacgcaatcaagctgggcagctggcttgattgccttccctgcgacctcaaggaccttacagtgggtagtatcaggaggggtcaggggctgtaaagcaccagcgttagcctcagtggcttccagcacgattcctcaaccattctaaccattccaaagggtatatctttggggggtgacattcttttcctgttttctttttaatctttttttaaaacatagaattaatatattatgagcttttcagaagatttttaaaaggcagtcagaaatcctactacctaacacaaaaattgtttttatctttgaataatatgttcttgtttgtccattttccatgcatgcgatgttaggcatacaaaatacattttttaaagaatactttcattgcagattggaaacttcgtttaaaaaatgctcatactaaaattggcatttctaacccataggcccacttgtagttatttaccgaagcaaaaggacagctttgctttgtgtgggtctggtagggttcattagaaaggaatgggggcggtgggagggttggtgttctgttctctctgcagactgaatggagcatctagagttaagggtaggtcaaccctgacttctgtacttctaaatttttgtcctcaggtcaatcctgaccgggttgttccccccgacctcgggcaccgcctacatcctgggaaaagacattcgctctgagatgagcaccatccggcagaacctgggggtctgtccccagcataacgtgctgtttgacatgtgagtaccagcagcacgttaagaataggccttttctggatgtgtgtgtgtcatgccatcatgggaggagtgggacttaagcattttactttgctgtgtttttgttttttctttttttcttttttatttttttgagatggagtctcgctctgtagccaggctggactgtagtggcgcgatctcggctcactgcaaccttggcctcccaggttcaagcgattctcctgcctcagcctcccgagtagctgggactctaggcacacaccaccatgcccagctaatttttgtgtttttagtagagacggggtttcaccatgttggccaggatggtctcaatgtcttgacctcgtgatccgcccacctcggtctcccaaagtgctgggaacacaggcatgagccactgtgtctggccacattttactttctttgaatatggcaggctcacctccgtgaacaccttgagacctagttgttctttgattttaggagaagtgggaggtgaatggttgagctgtagaggtgacatcagcccagccagtggatgggggcttgggaaacattgcttcccattattgtcatgctggagggccctttagcccatcctctcccccgccaccctccttattgaggcctggagcagacttcccagacctggtagtgcttcagggccctggtatgatggacctatatttgctgcttaagacatttgctcccactcaggttgtcccatcagccataaggcccccagggagcccgtgtgatggagcagagagagacctgagctctgcaatcttgggcaaggcttttcccttatgtttcttcttatctaaagtgaacagctggggctcatgtgctccctcctcatctaaagtgaacacatggggctcatgtgcagggtcctccccgctttcagagcctgaggtcccctgaggctcaggaaggctgctccaggtgagtgccgagctgacttcttggtggacgtgctgtggggacagcccattaaagaccacatcttggggccctgaaattgaaagttgtaactgcctggtgcatggtggccaggcctgctggaaacaggttggaagcgatctgtcacctttcactttgatttcctgagcagctcatgtggttgctcactgttgttctaccttgaatcttgaagattatttttcagaaattgataaagttattttaaaaagcacggggagagaaaaatatgcccattctcatctgttctgggccaggggacactgtattctggggtatccagtagggcccagagctgacctgcctccctgtccccaggctgactgtcgaagaacacatctggttctatgcccgcttgaaagggctctctgagaagcacgtgaaggcggagatggagcagatggccctggatgttggtttgccatcaagcaagctgaaaagcaaaacaagccagctgtcaggtgcggcccagagctaccttccctatccctctcccctcctcctccggctacacacatgcggaggaaaatcagcactgccccagggtcccaggctgggtgcggttggtaacagaaacttgtccctggctgtgcccctaggtcctctgccttcactcactgtctggggctggtcctggagtttgtcttgctctgtttttttgtaggtggaatgcagagaaagctatctgtggccttggcctttgtcgggggatctaaggttgtcattctggatgaacccacagctggtgtggacccttactcccgcaggggaatatgggagctgctgctgaaataccgacaaggtgcctgatgtgtatttattctgagtaaatggactgagagagagcggggggcttttgagaagtgtggctgtatctcatggctaggcttctgtgaagccatgggatactcttctgttatcacagaagagataaagggcattgagactgagattcctgagaggagatgctgtgtctttattcatctttttgtccccaacatggtgcactaaatttatggttagttgaaagggtggatgcttaaatgaatggaagcggagaggggcaggaagacgattgggctctctggttagagatctgatgtggtacagtatgaggagcacaggcaggcttggagccaactctggctggccctgagacattgggaaagtcacaacttgcctcaccttctttgccgataataatagtggtgcttacctcatagaggattaaattaaatgagaatgcacacaaaccacctagcacaatgcctggcatatagcaagttcccaaataaaatgctactgttcttacctctgtgaggatgtggtacctatatatacaaagctttgccattctaggggtcatagccatacagggtgaaaggtggcttccaggtctcttccagtgcttacccctgctaatatctctctagtccctgtcactgtgacaaatcagaactgagaggcctcacctgtcccacatccttgtgtttgtgcctggcaggccgcaccattattctctctacacaccacatggatgaagcggacgtcctgggggacaggattgccatcatctcccatgggaagctgtgctgtgtgggctcctccctgtttctgaagaaccagctgggaacaggctactacctgaccttggtcaagaaagatgtggaatcctccctcagttcctgcagaaacagtagtagcactgtgtcatacctgaaaaaggtgagctgcagtcttggtgctgggctggtgttgggtctgggcagccaggacttgctggctgtgaatgatttctccatctccaccccttttgccatgttgaaaccaccatctccctgctctgttgcccctttgaaatcatatcatacttaaggcatggaaagctaaggggccctctgctcccattgtgctagttctgttgaatcccgttttccttttcctatgaggcacagagagtgatggagaaggtccttagaggacattattatgtcaaagaaaagagacttgtcaagaggtaagagccttggctacaaatgacctggtgttcctgctcattacttttcaatctcattgaccttaacttttaaactataaaacagccaatatttattaggcactgatttcatgccagagacactctgggcatgaaagaaagtaatgataatagttaattttatatagcgttgttaccatttacaaccttttttttttttttaacctctatcatctcaattaaagtgcagagagaccctgggaagaaggtaactatatttattatcccagatgagggaagtgaggcttgtagggaattggtagctgattcaaggtcacccagcaggtaaataacagtggtgggaccagacccaattaccaggtatgttttcctctgtaccgcagtacatgcctgagatttatttgtgtgttgaagccagtggtacctaatgtatttacatcccaacctgaaactcctatccacttatttaccttttaatgagcctcttaactcaagtgcagtctgaggaccagcagcatcaggatcacttgggaacttgttagaaattcagcaacctgggcccagctcagacctaccgaatcagaatctgtgcattttaacaaggttcttgagtggttgaacacacattaaagcatgagaagcattgaactagacatgtagccaggtaaaggccttgcctgagatggttggcaaaggcctcattgcagcattcattggcaggccacagttcttttggcagctctgcttcctgacctttcaccctcaggaagcgaggctgttcacacggcacacacatgccagacagggtcctctgaagccacggctgccagtgcatgtgtcccagggaaagctttttcctttagttctcacacaacagagcttcttggaagccctccccggcgaaggtgctggtggctctgccttgctccgtccctgacccgttctcacctccttctttgccatcaggaggacagtgtttctcagagcagttctgatgctggcctgggcagcgaccatgagagtgacacgctgaccatcggtaaggactctggggtttcttattcaggtggtgcctgagcttcccccagctgggcagagtggaggcagaggaggagaggtgcagaggctggtggcgctgactcaaggtttgctgctgggctggggctgggtggctgcgggtgtgggagcagcttggtggcgggttggcctaatgcttgctggggtgcctggggctcggtttgggagctagcagggcagtgtcccagagagctgagatgattggggtttggggaatcccttaggggagtggacactgaataccagggatgaggagctgagggccaagccaggagggtgggatttgagcttagtacataagaagagtgagagcccaggagatgaggaacagccttccagatttttcttgggtagcgtgtgtaggaggccagtgtcaccagtagcatatgtggaacagaagtcttgacccttgctatctctgcctagtcctaatggctggcttttcccaggaaggcttctgcttccatggactgttagattaaccctttatttaggtaaatgagggaacctactttataagcataggaaagggtgaagaatcttttaagattcctttactcaagttttcttttgaagaatcccagagcttaggcaatagacaccagactttgagcctcagttatccattcacccatccacccacccacccacccatccttccatcctcccatcctcccattcacccatccacccatccagctgtccacccattctacactgagtacctataatgtgcctggctttggtgatacaaaggtgaataagacatagtcctttcctttgcccccaaccctcagaccagagatgaacatgtggaatgacctaaacacctggaacaggtgtggtgtatgagcggcaggcctctgatgagagggtgggggatggccagccctcactccgaagcccctctgagttgattgagccatctttgcattctggtccctgcagatgtctctgctatctccaacctcatcaggaagcatgtgtctgaagcccggctggtggaagacatagggcatgagctgacctatgtgctgccatatgaagctgctaaggagggagcctttgtggaactctttcatgagattgatgaccggctctcagacctgggcatttctagttatggcatctcagagacgaccctggaagaagtaagttaagtggctgactgtcggaatatatagcaaggccaaatgtcctaaggccagaccagtagcctgcattgggagcaggattatcatggagttagtcattgagtttttaggtcatcgacatctgattaatgttggccccagtgagccatttaagatggtagtgggagatagcaggaaagaagtgttttcctctgtaccacagtacatgcctgagatttgtgtgttgaaaccagtggtacctaacacatttacatcccaaccttaaactcctatgcacttatttaccctttaatgagcctctttacttaagtacagtgtgaggaacagcggcatcaggatcacttgggaacttgttagaaattcagcaacttgggcccagctcagacctactgaatcagaatcaggagcaattctctggtgtgactgtgtcacagccaggtatcaactggattctcatacataggaaatgacaaacgtttatggatggatagtctacttgtgccaggtgctgagatttgttttttgttttttgatttttttttaatcactgtgacctcatttaattctcaaaaaaagatgaaaaaatgaacactcaggaatgctgacatgagattcagaatcaggggtttggggcttcaaagtccatcctctctttatccatgtaatgcctccccttagagatacaacatcacagaccttgaaggctgaaggggatataaaagctgtctggccaagtggtctccaagcttgacagtgcagcagaatcacctggggatattattaaaaataaacatactaaggtttggcttcagggcctgtgaatcagaatttctggaggtgaggccttgaagtctgtatttctattgcatactttggacacagtggtctatagactagagtttggaaatgattgcgctcattcagattctcttctgatgtttgaattgctgccatcatatttctagtgctctatttcctcctgctcattctgtcttggataacttatcatagtactagcctactcaaagatttagagccacagtcctgaaagaagccacttgactcattccctgtaggttcagaataaatttcttctgcgcagtgtctgtcatagctttttttaaatttttttttatttttgatgagactggagttttgctcttattgcccaagctggagtgcagtggtgcgattttggctcactgcaacctccacctcccaggttcaagcgattctcctgcctcagcctcccaagtagctgagattacaagcatgtgctaccacgcccagctaattttgtatttttagtagagatgggttttatccatgttggtcaggctggtctcgagctccagacctcaggtgatctgcccgcctcggcctcccaaagtgctgggattataggcctgagccacagcgctcagccataactttaatttgaaaatgattgtctagcttgatagctctcaccactgaggaaatgttctctggcaaaaacggcttctctcccaggtaactctgagaaagtgttattaagaaatgtggcttctactttctctgtcttacggggctaacatgccactcagtaatataataatcgtggcagtggtgactactctcgtaatgttggtgcttataatgttctcatctctctcattttccagatattcctcaaggtggccgaagagagtggggtggatgctgagacctcaggtaactgccttgagggagaatggcacacttaagatagtgccttctgctggctttctcagtgcacgagtattgttcctttccctttgaattgttctattgcattctcatttgtagagtgtaggtttgttgcagatggggaaggtttgttttgttgtaaataaaataaagtatgggattctttccttgtgccttcagatggtaccttgccagcaagacgaaacaggcgggccttcggggacaagcagagctgtcttcgcccgttcactgaagatgatgctgctgatccaaatgattctgacatagacccaggtctgttagggcaagatcaaacagtgtcctactgtttgaatgtgaaattctctctcatgctctcacctgttttctttggatggcctttagccaaggtgatagatccctacagagtccaaagagaagtgaggaaatggtaaaagccacttgttctttgcagcatcgtgcatgtgatcaaacctgaaagagcctatccatatcacttcctttaaagacataaagatggtgcctcaatcctctgaacccatgtatttattatcttttctgcggggtcctagtttcttgtatacattaggtgtttaattgttgaacaaatattcattcgagtagatgagtgattttgaaagagtcagaaaggggaatttgctgttagagttaattgtaccctaagacttagatatttgaggctgggcatggtggctcatgccagtaatcccagcgctttgagaggctgaggtgggtagatcacctgaggtcaggagtttgagaccagtctgaccaacaaggtgaaaccccgtctctactaaatacaaaaaattagccgagtgtggtggcacatgcctgtcatcccagctacttgggaggctgaggcaggagaatcgcttgaacccaggaggcagaggttgcagtcagccacggttgcgccattgcactccagactgggcaacaagagtgaaaactccatctcaaaaaagaaaaaaaaagaattagatattttggatgagtgtgtctttgtgtgtttaactgagatggagaggagagctaagacatcaaacaaatattgttaagatgtaaaagcacatcagttaggtatcattagtttaggacaaggatttctagaaaatttttaggaacagaaaactttccagttctctcacccctgctcaaagagtgtatggctcttacattatatataactgcctgacttcatacagtatcagtacttagatcatttgaaatgtgtccacgttttaccaaaatataatagggtgagaagctgagatgctaattgccattgtgtattctcaaatatgtcaagctacgtacatggcctgtttcatagagtagtctataagaaattgatgacttgattcatccgaatggctggctgtaacacctggttacgcatgaacacctcttttcagttgtctcaagacacctttcttttctgtacttatcagacaaggactgaaaggcagagactgctactgttagacattttgagtcaagcttttccttggacatagctttgtcatgaaagccctttacttctgagaaacttctagcttcagacacatgccttcaagatagttgttgaagacaccagaagaaggagcatggcaatgccgaaaacacctaagataataggtgaccttcagtgttggcttcttgcagaatccagagagacagacttgctcagtgggatggatggcaaagggtcctaccaggtgaaaggctggaaacttacacagcaacagtttgtggcccttttgtggaagagactgctaattgccagacggagtcggaaaggattttttgctcaggtgagacgtgctgttttcgccagagactctggcttcatgggtgggctgcaggctctgtgaccagtgaaggcaggatagcatcctggtcaagatatggatgccggagccagatttatctgtatttcaatcccagttctattccttgccagttgtgtatccgctggcaagttacttctctatgcctcaatctcctcatctgtaaaatggggataataatattacctgcaatacagggttgttacgaaaataaaaatgaataggtgcttagaatggggcctgacattagtaagtgcttagttttgtgtgtgtatatgttatttttattttggaggagaacataaaaaggacaaagtgtagaaaaactggttgggtgtattcagctgtcataacatgagagttgttatgcccagatgcacttgacatgtgaatttattagaaacatgatttttctctgagttgatgtttaactcaaactgatagaaaagataggtcagaatatagttggccaacagagaagacttgttagactattgtctgcatgtcagtgtttgcatgctaacttgcttagttagaaaggttaaattttttcactctataaaatcaagaaatatagagaaaaggtctgcagagagtctttcatttgatgatgtggatattgttaagagcgggagtttggagcatacagagctcaagttgaatcctgactttgctacttattggctatatgaccttgggcaagctgcttagtctctctgatcctcagttacctttgtttgttgatgatgaccattgataacacaaccataaataatgacaacatagagatagttctcattatagtagttgttatacagaattattcactcaatgttaattttctgcattgaaatcccagaacattagaattgggggcattatttgaatctttaaggttataaggaatacatttctcagcaataaatggaaggagttttgggttaacttataaagtatacccaagtcatttttttttcagagaagatatggtagaaagtcttaggaggttgaagaaggaattggatatttattctttctgagactatcatgggagataatgactatggttgtccatgattggagccgttgctgtagagttggttttattatagtgtaggatttgaatgggccatgtgttctcagacctcagattaaaatgagaaaactgaggccagtggggagcgtgacttcacatgggtacacttgtgctagagacagaaccaggattcaggacttctggctcctggtcctgggttcatggcccaatgtagtctttctcagtcttcaggaggaggaagggcaggacccagtgttctgagtcaccctgaatgtgagcactatttacttcgtgaacttcttggcttagtgcctctgccaggtggccataacctctggccttgtgttgccagagaaaaggtttagttttcaggctccattgcttcccagctgccaagaatgccttggtgcagcacagtcataggccctgcattcctcattgccgtgctggttggtcggggaggtgggctggactcgtagggatttgccccttggccttgtttctaacacttgccgtttcctgctgtccccctgccccctccactgcctgggtaaagattgtcttgccagctgtgtttgtctgcattgcccttgtgttcagcctgatcgtgccaccctttggcaagtaccccagcctggaacttcagccctggatgtacaacgaacagtacacatttgtcaggtatgtttgtcttctacatcccaggagggggtaagattcgagcagaccaaagatgtttacgagggccaagggaatggacttcagaattacacggtggaatgaattttactgctgcggctcaggtccctgtataagctaatactgcatgcatagaacagcagcgaactaaccctgaataataggccagtcttctgttgagcctttcagcctctctcctcttcatcctactgttgtcaggaacagccacatgtgttttaggtgaaataatccacccttgcaaaaatccatgattaagttataaaatatttggatttgtggagctgtgttttaattctgtaactgagtcacagggcacactgtcaaagcatagaacctccagagacttgttttctgcaaagtataattcatgtaattattatctattctgttatatttgggatgttaggtagtgtttgttctttagataaaaatatcccccactctgtaacaatacattaaatcaaagaaaaggacaaaggatttttctgggtcttgttagcaggagctttcttcagtcctgaaagatttgtagacctgtagatgggggaactgtgtcagtgatacaaaagggaagcatttaaaaaaaaaaaagtatatatatatatatatatatatatatgtaatgtgaattggcctctttttctctaagcccacattttcttcttacatagttcaggtttactttattttttcctttccggctgctgaccctgtattgcccgtagttgtggaacatagcatgtgtttgtgacctgtgcctgttatttttgtgctttctagttgtgcatgcaaagagtacaaagttttcttgccctttcttggaaaatcctgcttgtctgtgccaaagggataattgtgaaagcacttttgaaatacttaatgagttgattttcttcaaattaaaaaaaatatataaatgtatatgtgtatgtacatgtgtgtacacatacacacctttatacatacagcccatttaaaacaagctccactttggagtgctctacgtcaccctgatgccgaatacagggccagagtctgagatccttctgggtggtttctgtgttttgttcatttctgttttaagagcctgtcacagagaaatgcttcctaaaatgtttaatttataaaaacatttttatctctcgattactggttttaatgaattactaagctggctgcctctcatgtacccacagcaatgatgctcctgaggacacgggaaccctggaactcttaaacgccctcaccaaagaccctggcttcgggacccgctgtatggaaggaaacccaatcccgtgagtgccactttagccataagcaggcttcttgtgcttgttgcctggtttgatttctaatatgctgcatttatcaactgcatgccacattgtgaccgccagcatttgccctttgaattattattatgttttatttacaaaaagcgaaggtagtaaccgaactaaattatctaggaacaaacgtttggagagtcttctaacaccgtgcaaagcacgtcattacagacatttgtttactgatttagaaccttaatatttaatttaaatagcactttacacttactgatgaaatgcttttcctttctttctctcccagcccctgtacttaagtgcttcaataggctctcattatatatgatttttaggttttgcttatcagcttcttcgcttttataatctgaaaagatggcatatgaatttttataaaaagggacactttcttcttctcaaattgtatatttttattgtactttccttcaaaacccccttttaaaaagtaagcagtggataaataaattcagtgaagcatccatatgacccttaagtgagtgtaggggaagggaggtcaccagatcactgtgagtgaagatggtggagaggtgaggatcttatgaggccgtgctcaaggctggtagaggtgggttagtgtttccaggtttaggcagaatctcagctgaggtcatgaaacaacagtgatctctgaaaaattatggcaaggtgggaaggtgctggagaattggagagggggcaaacttgactttcaagtttcaatgggaagataggtgactctgcacaccacagaacagtgagcatgataacctgtttatacaaggttctagagcagatttctaaatggatagctactgtgtgcttgtttgttcttaattagtattggatagttactaaatacttgttagtacttagtacataatgggtggtaaatcctagcagctaatattggttcccaaataaccagatgacaaggatagagaaggacacagacacggcctatctggatttcatggtgcctttgattttccacatgaaggttgtgtagggaagatagaagcatgagatgagatgataatatagttatctggattcatcactggccagctgaaccatatgaactcatggattgatgctagcttaggaaggctctgtaggagccagaactgggctgagagccagcccatagagacaaaagaggcccggccctgacatcagagggttcaaacatgatgtctgagccccacctacagtctgccggaggtggttggaaggaagagcctttatccttacaattcttactgaaattcaaatttttaggttttgcaaaaaaatggtggacctgaaggaaatttgacaggagcatgtctcagctgtatttaaatttgtctcagccaatccccttttgaatgttcagagtgtaagcttcaggagggcagcgcgtcttagtgtgacttttctggtcagttcaggtgctttaaggagacaattagagatcaatctggaaaacttcatttgaatttttaatacataagaaaacaataagaaatagttaaaaatatatatttataatatatatatgtgtgtgtgtgtgtgtgtgtgtgtgtgtgtatatatatatattttatttatttatttttttttgagatggagtctcgctctgttgcccaggctggagtgcagtggctcaatcttggctcactgccacctctgcctcccaggttcaagtgattctcctacctcagcctcctgagtagctgggattacaagcatgtgccaccacactggctaatttttctaattttagtagagatggagtttcaccatgttggacaggatggtcttgaactcctgacttagtgatccacccgccttcgcctcccaaagttctgggattacaggcatgagccatcgtgcctggcaattatatttaatatttaataataaggaaataattgctgtaactttactttaaattgtggaattctgaaactggaagggaactggaaatgacttgttgaatcaaatcattttaaacttttattttgccagtggaaaaaataagcccccaaaagagcaggggacctgctgatgtcccacagtaattcagagctggagatgaggttgaaggctttgtgtcttatctccagggaaaatttgtagacagcgtagctctttatgtgacgagcattctcaccccagtcatcccccaattctctactcatttgagaacataaattggatcttgccagtctctactcatttttcagcacatcgagcataagatccagactctttcccaggcctctctcatctggctcctctcctcctcctttatcattactcttcttcgtagcttatcctactccagccatgctgtcttcctattattcctaaaaaatagaaatgcatttcttcctagggcctttgtacctgcacttgccatcgcttttgctcagaatgttctttttgccaagcttttgcccagcttgttctccatcattgttatgttttggctgaaatgtcttctcttagtaggttcattctccccagtcactgtctttttattttgctttattttgggccatctaaggttatcttattagtgtatttgttgttcgtctcctccatgggcatacacctccatgaaggcaggtattttcaccttaggccctcgaatatactggacagcatctggcacgtagtagatgctcaacgaatgtttgttgtgtgagcaaatggttggttgattggattgaactgagttcagtatgtaaatatttagggcctctttgcattctattttacttatgtataaaatgatacataatgatgatataaatgatgtcacagtgtacaaggctgttgtgggatcaagcaatcaaatgagatcatgcttgtcttttccaaatggtgagggaatagatgcatgtttgtggttgttacggaatgatcctgtgctcctgaggcaacagaaaggccaggccatctctggtaatcctactcttgctgtcttccctttgcagagacacgccctgccaggcaggggaggaagagtggaccactgccccagttccccagaccatcatggacctcttccagaatgggaactggacaatgcagaacccttcacctgcatgccagtgtagcagcgacaaaatcaagaagatgctgcctgtgtgtcccccaggggcaggggggctgcctcctccacaagtgagtcactttcagggggtgattgggcagaaggggtgcaggatgggctggtagcttccgcttggaagcaggaatgagtgagatatcatgttgggagggtctgtttcagtcttttttgttttttgtttttttttctgaggcggagtcttgctctgtcgcccaggctggagtgctgtggcatgatcttgcctcactgcaacctccacctcccaggttcaagcgattctcctgcctcagcctcctgagtagctgggattacaggcacgcaccaccatgtctggctaatttttgtgtttttagtagagatagggtttcgccgtgttggctaggctggtctggaattcctgacctcaggtgatccacccgcctcggcctcccaaagtgctgggattacaggcgtgagccactacgcccagccctgtttcagtctttaactcgcttcttgtcataagaaaaagcatgtgagttttgaggggagaaggtttggaccacactgtgcccatgcctgtcccacagcagtaaagtcacaggacagactgtggcaggcctggcttccaatcttggctctgcaacaaatgagctggtagcctttgacaggcctgggcctgtttcttcacctctgaattagggaggctggaccagaaaactcctgtggatcttgtcaactctggtattcttagagactctgtttgggaaggagtcctgagccattttttttttcttgagaatttcaggaagaggagtgcttatgatagctctctgctgcttttatcagcaaccaaattgcaggatgaggacaagcaattctaaatgagtacaggaactaaaagaaggcttggttaccactcttgaaaataatagctagtccaggtgcggggtggctcacacctgtaatctcagtattttgggatgccgaggtggactgatcacctaaggtcaggagttcgaaaccagcttggccaatgtggcgaaaccctgtctctactaaaaattcaaaaattagccaggcatggtggcacatgcctgtaatcccagttacttgggaggctgaagcaggagaattgcttgaacctgggaggtggaggtcgcagggagccaaaattgcgccactgtactccagcctgagcaacacagcaaaactccatatcaaaaaataaaatgaataaaataacagctaatctagtcatcagtataactccagtgaacagaagatttattaggcatagtgaatgatggtgcttcctaaaaatctcttgactacaaagaatctcatttcaatgtttattgtttagatgttcagaataaattcttgggaaagaccttggcttggtgtaagtgaattaccagtgccgagggcagggtgaaccaagtctcagtgctggttgactgagggcagtgtctgggacctgtagtcaggtttccggtcacactgtggacatggtcactgttgtccttgatttgttttctgtttcaattcttgtctataaagacccgtatgcttggttttcatgtgatgacagagaaaacaaaacactgcagatatccttcaggacctgacaggaagaaacatttcggattatctggtgaagacgtatgtgcagatcatagccaaaaggtgactttttactaaacttggcccctgccgtattattactaattagaggaattaaagacctacaaataacagactgaaacagtgggggaaatgccagattatggcctgattctgtctattggaagtttaggatattatcccaaactagaaaagatgacgagagggactgtgaacattcagttgtcagcttcaaggctgaggcagcctggtctagaatgaaaatagaaatggattcaacgtcaaattttgccacttagtagcaacttgaccaggtaactggttatccttttaaagccttagtttatctaaattgtgatattaatgttgctcttataagtttgtcatgaggactaaattaaatggtgtacatagagtgccttgggtactctctgatgggggactccatgataatttgtggtctcatggagggagctctgggaaggtttaggagcctgccttggctctgcagccttgggagagccttctagcttcccaggacatggcagcctagtgttgaatgcttggctcagcaaatgtttgttctcgtttccttcccatcaacttggtcagttggggtctttcagttaggagtatctcagtgactttaaatggcatgggcatgctggagtgatagtgaccatgagtttctaagaaagaagcataatttctccatatgtcatccacaattgaaatattattgttaattgaaaaagcttctaggccaggcacggtggctcatgcctgtaatcccagcactttaggaggccaaggcgggtggatcacttgaggtcaggagtttgagaccagcctggccaacatggggaaaccctgtctctactaaaaatacaaaataagctgggcgtggtggtgcgtgcctgtaatcccagctacttgggaggctgaggcaggagaattgcttgaatctgggaggcggaggttgcagtgagctgagttcatgccattgcattccagcctgggcaacaagagcgaaaccatctcccaaaagaaaaaaaaaagaaagaaaaagcttctagtttggttacatcttggtctataaggtggtttgtaaattggtttaacccaaggcctggttctcatataagtaatagggtatttatgatggagagaaggctggaagaggcctgaacacaggcttcttttctctagcacaaccctacaaggccagctgattctagggttatttctgtccgttccttatatcctcaggtggatatttactccttttgcatcattaggaataggctcagtgctttctttgaactgattttttgtttctttgtctctgcagcttaaagaacaagatctgggtgaatgagtttaggtaagttgctgtctttctggcacgtttagctcagggggaggatggtgttgtaggtgtcttggattgaagaaagccttggggattgtttgtcactcacacacttgtgggtgccatctcactgtgaggaggacagaagccctgtgaacatgtggagcacacaggggcacagacagatttagattaggcctgctttatagagtttctgcctagagcatcatggctcagtgcccagcagcccctccagaggcctctgaaatatttgatatactgatttccttgaggagaatcagaaatctcctgcaggtgtctagggatttcaagtaagtagtgttgtgaggggaatacctacttgtactttccccccaaaccagattcccgaggcttcttaaggactcaaggacaatttctaggcatttagcacgggactaaaaaggtcttagaggaaataagaagcgccaaaaccatctctttgcactgtatttcaacccatttgtccttctgggttttgaaggaacaggtgggactggggacagaagagttcttgaagccagtttgtccatcatggaaaatgagataggtgatgtggctacgtcagggggcccgaaggctccttgttactgatttccgtcttttctctctgccttttccccaagggccaggacccctggatctctgggcagagcagacgcaggcccctataatagccctcatgctagaaaggagccggagcctgtgtataaggccagcgcagcctactctggacagtgcagggttcccactctcccaactccccatctgcttgcctccagacccacattcacacacgagccactgggttggaggagcatctgtgagatgaaacaccattctttcctcaatgtctcagctatctaactgtgtgtgtaatcaggccaggtcctccctgctgggcagaaaccatgggagttaagagattgccaacatttattagaggaagctgacgtgtaacttctctgaggcaaaatttagccctcctttgaacaggaatttgactcagtgaaccttgtacacactcgcactgagtctgctgctgatgatactgtgcaccccactgtctgggttttaatgtcaggctgttcttttaggtatggcggcttttccctgggtgtcagtaatactcaagcacttcctccgagtcaagaagttaatgatgccatcaaacaaatgaagaaacacctaaagctggccaaggtaaaatatctatcgtaagatgtatcagaaaaatgggcatgtagctgctgggatataggagtagttggcaggttaaacggatcacctggcagctcattgttctgaatatgttggcatacagagccgtctttggcatttagcgatttgagccagacaaaactgaattacttagttgtacgtttaaaagtgtaggtcaaaaacaaatccagaggccaggagctgtggctcatgcctgtaatcctagcactttgggaggccgaagcgggtggatcacttgaggtcaggagttcgagaccagcctggcctacatgacaaaaccccgtatctactaaaaatacaaaaaaattagctgggcttggtggcacacacctgtaatcccagctacttgggaggctgaggcaggagaattgcttgaaccctgtaggaagaggttgtagtgagccaagatcgcaccgttgcactccagcctgggcaacaagagcaaaactccatctcaaaaaacaaattaaatccagagatttaaaagctctcagaggctgggcgcggtggcttacacctgttatcccagcattttgggatgccgaggcgggcaaagcacaaggtcaggagtttgagaccagcctggccaacatagtgaaaccctgtctctgctaaaaacatagaaaaattagccgggcatggtggcgtgcgcctgtaatcccagctactcgggaggctgaggtgagagaattacttgaacccgggaggcggaggttgcagtgagcccagattgcaccactgcactccagcctgggcgacagagcaagactccatctcaaaaaaagctctcagaacaaccaggtttacaaatttggtcagttggtaaataaactgggtttcaaacatactttgctgaaacaatcactgactaaataggaaatgaatcttttttttttttaagctggcaagctggtctgtaggacctgataagtactcacttcatttctctgtgtctcaggtttcccatttttaggtgagaattaaggggctctgataaaacagaccctaggattgtggacagcagtgatagtcctagagtccacaagtctgcttttgagtgatgggcccatgtatctggcacatctgcaggcagagcgtggttctggctcttcagatgatgccggtggagcactttgaggagtcctcaccccaccgtgataaccagacattaaaatcttggggctttgcatcccaggatttctctgtgattccttctagacttgtggcatcatggcagcatcactgctgtagatttctagtcacttggttctcaggagccgtttatttaatggcttcacatttaatttcagtgaacaaggtagtggcattgctcttcacagggccgtcctgttgtccacaggttccagattgactgttgccccttatctatgtgaacagtcacaactgaggcaggtttctgttgtttacaggacagttctgcagatcgatttctcaacagcttgggaagatttatgacaggactggacaccaaaaataatgtcaaggtaaaccgctgtctttgttctagtagctttttgatgaacaataatccttatgtttcctggagtactttcaactcatggtaaagttggcaggggcattcacaacagaaaagagcaaactattaactttaccagtgaggcagtacggtgtagtgtagtgattcagagaatttgctttgccaccagacataccaggtaaccttgactaagttacttaacctatctaaacctcagttccctcatctgtgaaatggagacagtaatcatagctatttccaaactgttgtgagaattcaatgagttaaaggtataaggtcctcaccacagcgcctgcccacatagtcagtgatcactatgtcctgaacactgtaattacttcgccatattctctgatcatagtgttttgccttggtatgtgactagaatttctttctgaggtttatgggcatggttggtgggtatgcacctgcctgcaggagcccggtttgggggcattaccttgtacctggtatgttttctttcaggtgtggttcaataacaagggctggcatgcaatcagctctttcctgaatgtcatcaacaatgccattctccgggccaacctgcaaaagggagagaaccctagccattatggaattactgctttcaatcatcccctgaatctcaccaagcagcagctctcagaggtggctctgtaagtgtggctgtgtctgtatagatggagtggggcaagggagagggttatggagaaggggagaaaaatgtgaatctcattgtaggggaacagctgcagagaccgttatattatgataaatctggattgatccaggctctgggcagaagtgataagtttacgaattggctggttgggcttcttgaactgcagaagagaaaatgacactgatatgtaaaaatcgtaacatttagtgaattcatataaagtgagttcaaaaattgttaattaaattataatttaattataagtgtttaatcagtttgatttgtttaaaaaccactgttttaaatttggtggaatatgtttttattagcttgtatctttaattcctaaattaagctgtgtgtgtgtgtgtgtgtgtgtgtgtgtgtgtgtgtgtgtgaagtttaaagccaggatgagctagtttaaagtatgcagcctttggagtcatacagatctgggtttgaatctggtctctaaactttatagatgtatgatattaaatgaggcagttcatgtaaattgccaagcccagcactcagcacagagttgatatttcacacacattagatacctttcctgtatgtggagcatggcagttcctgtttctgctttactcctacaggatactaatataggacactaggatctttataccaagaccccatgtaatgggcttatgagaccattcttcttataaaaatctgacagaatttttgtatgtgttagatcaataggctgcatactgttattttcaagttgatttacagccagaaatattaatttatttgagtagttacagagtaatatttctgctctcatttagttttcaagccccactagtcctttgtgtgtgaaaatttacaacttactgctcttacaaggtcatgaacagtggaccaaagtgaatgccattaaccactctgacttccttcattagttttattgtgacagtggactcttttgacctcagtaataccagtttggcatttacattgtcatatttttagacttaaaaatgatcatcttaaccctgaataaaatgtgtctggtgaacagatgtttttccttgggctgtgcctcagatatctctgtgtgtgtgtacgtgtgtgtttgtctgtgtgtccatgtcctcactgattgagccctaactgcatcaaagacccctcagattttcacacgctttttctctccaggatgaccacatcagtggatgtccttgtgtccatctgtgtcatctttgcaatgtccttcgtcccagccagctttgtcgtattcctgatccaggagcgggtcagcaaagcaaaacacctgcagttcatcagtggagtgaagcctgtcatctactggctctctaattttgtctgggatatggtaaggacacaggcctgctgtatctttctgatgtctgtcagggccatggattgatatggataagaaagaaagagctctggctatcatcaggaaatgttccagctactctaaagatgtatgaaaaagaaatagccagaggcaggtgatcactttcatgacaccaaacacagcattgggtaccagagttcatgtcacaccagagggaaaattctgtacacaatgatgaaaattaataccactaccacttaagttcctatgtgacaactttcccaagaatcagagagatacaagtcaaaactccaagtcaatgcctctaacttctctgatgggttttaacctccagagtcagaatgttctttgccttactaggaaagccatctgtcatttgaaaactctgtacattttatcagcagcttatccatccattgcaaatatgtttttgtgccagccacaatatattgcttctatttggaccaatatgggggatttgaaggaattctgaagttctaattatatttcaactctactttacaatatctccctgaaatatatctccctgtaacttctattaattataagctacacagagcaaatctaattcttctcccaccgaacaagtccctggatatttaaaaataactctcatactctcatttaacctgagtattacccagataagatgatatatgagaatacaccttgtaacctccgaagcactgtacaaatgtgagcaatgatggtggagatgatgatgagatctttgctgtttataccaagccccttagactgtgtcactcttctgatccggttgtccttgtatggccatgctgtatattgtgaatgtccgttttcaaaagcaaagccaagaattaaccttgtgttcaggctgtggtctgaatggttatgggtccagagggagttgatctttagctcacacttctattactgcagcacaaagattttgcattttggaaggagcaccgtcttactggcaacttagtggtaaaccaaaacctccatttcacacaaatgattgtgaaattcgggtctccttcattctatacaaattcatttgatttttttgaaactaaactttatatttatccatattaaattacatgggttttatttttgttttatcttgattcagtaattactcctttcagtaaacacagactgagtgctgtgtgtctgacttatgccaggcataggtgattcagagatgaaaggtcaagtccctgaacccatctcttgtcttcctgggtattatctgtccctccctgctttagagctcctgaaatttgctagaagcatgtcttcatctaagttgttgataaacacatcaagtaggattggactgaggcagagccctgtagtctgaagctgcagttcttctagcggctgacaagccccactatcacttccctgctggtgctttgctctgccagctgtgaattctcataattgtcctatcgtcaagtctttatttctgcattttactgcttgatacactgtcaggacagactttaaaattattctcagtgcgatgaaacaattctgacattcatgttatgagcagttacctcataaatagattacatgtgagattgaacttgggcagactataatatagcattaatgacgaaacagacacagtcatcttcgggaagaagaatagaggcttatttgctgcctgtgaaattaaaattactctgactgggaatccatcgttcagtaagtttactgagtgtgacaccttggcttgactgttggaaagacagaaagggcatgtagtttataaaatcagccaaggggaaaatgcttgtcaaaatgtattgtcgggtattttgattaatagtttatgtggcttcattaattcagagttactctccaatatgtttatctgccctttcttgtctgataatggtgaaaacttgtgtgatgcattgtatatttgatttaggggtgaactggatgtctttgttttcacttttagtgcaattacgttgtccctgccacactggtcattatcatcttcatctgcttccagcagaagtcctatgtgtcctccaccaatctgcctgtgctagcccttctacttttgctgtatgggtaagtcacctctgagtgagggagctgcacagtggataaggcatttggtgcccagtgtcagaaggagggcagggactctcagtagacacttatctttttgtgtctcaacaggtggtcaatcacacctctcatgtacccagcctcctttgtgttcaagatccccagcacagcctatgtggtgctcaccagcgtgaacctcttcattggcattaatggcagcgtggccacctttgtgctggagctgttcaccgacaatgtgagtcatgcagagagaacactcctgctgggatgagcatctctgggagccagaggacagtgtttaattgtgatcttattccacttgtcagtggtattgacactgctgactgccttgtcctgtcttcagagtctgtcttccctgagaaggcaaagcacctttctttcttgctgtgccttacattttgctggtcaagcctttcagtttcttttgacagttttttttacttctttcttttttcaatgttgctcttaccaagagtagctcctctgccttccactttacacatgagagctgggcgacgccattcagtcctaaggcttttaccatcacctctcttggtgtttttattgtcatctctaagatcaatgcctttagccttgatcataaccttgaactctaatctcaaattctcacttgcctagtggattgctccatttagatagtatatagataccccaacctggatatgtcctagttttctttccccttggaacttaatgcttttcttgccatccctgtcacactcagtggcactaccatccactcggttgcccaagctggctcttagagttatcctagatgcttgctttgctgttgcagatttcccacattcaactggttatgttgtcagttcttccaggtatggacctctaaaataaggcttcctctccattccggttgtcattgcctttgtccaaacacagcacacaaggccttttacagttgcacaactcttcctgtccatacccaccacaccctttcccagctgtaagcttcagatgagttgcctccaaccaccatgctcctgtaggcctggcttgaaatgcccttcttctgtcacagggtctggtagtatatcccttgcccttcaagatttagctaaaatgtgaagctttccttacctgctgggaggtgttctctcttttctctgtgctctcagagtccttagtccatgcctccagtacaacgtacatccacttacatggtaatttcctgtttacatacttttcctactcggagtggagtctgtttcttaataattttgcctctcccatgccctagcacagtgcatccagcgtatagccccttattcagttggtagatatttggccactgttgccttgtgggatcataagttctgatgtatttgagaagaatttctaaaattctgacaaaatcctgaaactcaaatattgacccagacatgagcaatttgcttttcaaatgctaagggatttttaatggatttgctttaattaaatctagcctgtttctaagctttattcattatttctccatactcagagcatttctccagattttctaaagaatagaattttattgctacatatcatcagctatgcctgctgctatttaattggtatctgaattaaaaggtctggtttgtccctagagaatcaaattttttcttcactcccatatttcagaacttgatacatttttaggataaaccatgaatgacacccgtttcttctccctcaccctcccttccctcccattttttttttttttttttagaagctgaataatatcaatgatatcctgaagtccgtgttcttgatcttcccacatttttgcctgggacgagggctcatcgacatggtgaaaaaccaggcaatggctgatgccctggaaaggtttggtgagtgaagcagtggctgtaggatgctttaatggagatggcactctgcataggccttggtaccctgaactttgttttggaaagaagcaggtgactaagcacaggatgttcccccacccccatgcccagtgacagggctcatgccaacacagctggttgtggcatgggttttgtgacacaaccatttgtctgtgtctctgatagcattgagaaaagtgaaagggcagttttgaaggtaaggaaaatagtggcatttgcttggatccactggctcatgccactgtctgggttggttagaagcactggaaaagtcaaaccataactttgagaattaggtgatcagggaatcagaaggaaagatgcaaactttggctcttttaggcgaatcatgtgcctgcagatgaggtcatttattatcttttacacagtctataaaattataatgtattacatctttttctacctttagaatggttaaaaatatttctccggtagccatatgattattattcatccattagataatatagtcaaatgggccatgttatttactgttcatagaagaggggctttttgcaacttgggctacaaaggagatatgtaaggaatttaaggaatggttacatggaactagatttaattgaatctagtggtttaattgattcactaggatatatgctactgaaaggggaatctgcttaaagtgctttctgatatttattattactaaaacttagaatttattaaaaatactgactgtgaaaattacttgggtcgtttgcctttttaaaaggatttttggcatgtctcattaaaaaaagaaatactagatatcttcagtgaagttacaaatcgaatacacattggctctgaaattctgattgatactgggtcataaaaagttttcccaaatcagacttggaaagtgatcactctcttgttactcttttttccttgtcatgggtgatagccatttgtgtttattggaagatcggtgaattttaaggaacataggcccaaatttgaggaagggccatggtttttgatccctccattctgaccggatctctgcattgtgtctactaggggagaatcgctttgtgtcaccattatcttgggacttggtgggacgaaacctcttcgccatggccgtggaaggggtggtgttcttcctcattactgttctgatccagtacagattcttcatcaggcccaggtgagctttttcttagaacccgtggagcacctggttgagggtcacagaggaggcgcacagggaaacactcaccaatgggggttgcattgaactgaactcaaaatatgtgataaaactgattttcctgatgtgggcatcccgcagccccctccctgcccatcctggagactgtggcaagtaggttttataatactacgttagagactgaatctttgtcctgaaaaatagtttgaaaggttcatttttcttgttttttcccccaagacctgtaaatgcaaagctatctcctctgaatgatgaagatgaagatgtgaggcgggaaagacagagaattcttgatggtggaggccagaatgacatcttagaaatcaaggagttgacgaaggtgagagagtacaggttacaatagctcatcttcagtttttttcagctttatgtgctgtaacccagcagtttgctgacttgcttaataaaagggcatgtgttcccaaaatgtacatctataccaaggttctgtcaattttattttaaaaacaccatggagacttcttaaagaattcttactgagaattcttttgtgatatgaattcccattctcgaatacattggttttatatgcttacatttatgtgttagttattaaaacatactaatattgtatatctagtcaaaactgaggtagagagaataaatggttgattttgagtttgagtttcatagtccaaaaagctgatatattgcctgtgttcaagagggtctatatcagccctctagatgccagcatctccaaattttacttttttggaatctgtacagtatttgcaatatttttattacaaatttctactctgtggaatttaatttttaaaatacctgcaatacatatatatgttgaatagatgaaaaattatgtagataataatgaatgatacggttctaaaaagacaggttaaaaagtaagttcacttttattttgagcttcagaatcattcagaagccagtcgccacaaacgcagaccaaggctcttggcacatcaaatatgcctatggcttagggttattgacaagtcttatgttgcagtgtatgtggtttatagtcctgccttccacagttgcttgggagagctgtgagtcactgaggcttatgaatgtttacattttgtttgttgcagatatatagaaggaagcggaagcctgctgttgacaggatttgcgtgggcattcctcctggtgaggtaaagacactttgtctatattgcgtttgtccctattagttcagactatctctacccaatcaagcaacgatgctcgttaagaggtaaaagtggattttaaaggcttctgtatttatgccaggatggagcaattagtcatcgagaagagagggaccctgtatgtcaagagaatgatttcagagaatccaatacaatttaagaaaaagcatggggctgggcgcagtgattcactcctgtaatcccagcactttgggaggccgaggtgggcggatcacgaggtcaggagattgagaccatcctggccaacatggtgaaaccccatctctactataaatacaaaaattagctgggcatagtagtgcattcctgtagtcccagctactcgggaggctgaggcaggagaattgcttgaacctaggagggggaggttgcccagattgcgctgctgcactccagcctggtgacagagtgagactcatgtcaacaacaaaaacagaaaaagcacgcacatctaaaacatgcttttgtgatccatttgggatggtgatgacattcaaatagttttttaaaaatagattttctcctttctggtttccgtttgtgttcttttatgcccttttgccagagtaggtggtgcaatttggctagctggctttcattactgtttttcacacattaactttggcctcaacttgacaactcaaataatatttataaatacagccacacttaaaatggtcccattatgaaatacatatttaaatatctatacgatgtgttaaaaccaagaaaatatttgattcttctctgatatttaagaattgaaggtttgaggtagttacgtgttaggggcatttatattcatgtttttagagtttgcttatacaacttaatctttccttttcagtgctttgggctcctgggagttaatggggctggaaaatcatcaactttcaagatgttaacaggagataccactgttaccagaggagatgctttccttaacaaaaataggtgagaaaagaagtggcttgtattttgctgcaaagactttgtttttaatttatttaaagaaataggttgttatttttgattacagtggtatttttagagttcataaaaatgttgaaatatagtaaagggtaaagaagcacataaaatcatccatgatttcaatatctagagataatcacaatttacatttcctttcagtctcattctcttcttttaacagctttattcaggtataatttacatacaatataatttgcttgttttttaagagtataatttagtgatttttggtaaattgagagttttgcaaccatcaccacaatccagttttagaacttttccatcaccccacatctgtcttatatacacatataaatgtgccatacaattgagatcatactgtatgtagaatttaaaattagtttttattgttaatgagtgtattatgaatatttcccagtgggttacatttcctaagatgtggaattttacattgctacataaaatccccctatgtacatgtacctataatttatttaataaattccttataaatgttggacacattagtttccatttttcactatgtaaatatgtccctgtatacatcttttattatttcctcaggaacaattcctacaaagtaaattgccctctctaaagagcatacaaattgactgagccaccgttaggccattttctgagactgcacaggtcacaaagcaatctgatctttgggaatacagctacattttataggcttcttagataatgttactctaagtactttaaatatgtggggcttctctgggcttttttttttttgagacggagtttcactcttactgcccaggctggagagcaatggcgcgaccttggctcactgcaacctccgcctcccaggttcaagcgattctcctgcctcagcctcctgagtagctgagattacaggtgcccgccacaatgcctgcctaatttttttgtattttcagtagagatggggtttcaccatgttggccagactggtctcgagctcctgacctcaggtgatccacctgcctcagcctcccaaagttctgggattacaggcatgagccactgcgcccggcttctctggacttattatgtggagagatagtacaaggcagtggctttcagagttttttgaccatgaccgttgtgggaaatacattttatatctcaacctagtatgtacacacagacatgtagacacatgtataacctaaagtttcataaagcagtacctactgttactaattgtagtgcactctgctatttcttattctaccttatactgcgtcattaaaaaagtgctggtcatgacccactaaatttatttcccaaaccactaatgaacaatgactcacaatttgaacacactggacagggggatagccaataaaattgaaaagagcaaggaaattaatgtattcatgatctcctctcctgtctcttacatttttgcagtagcaatgtaaaggaatcctaagagaacagacattctgggaatagcaggcctagcgctgcacaactgctttcctaggcttgctcctagtaccaagctcctgacgcatatagcagtggcagtaataaccagcccatagtaaggtttgtcacagggactggttgtaagaactgatttggttggtatagctgtgagggcctggcacggtgtccacgtgtgcctcaatcctaattctgaaaaaggctgaccctgggggtgctaattagatacacagagaggaatgaatgctgccagaaggccaagttcatggcaatgccgctgtggctgaggtgcagtcatcagtctggaacgtgaacactgaacttctctcacatgtgattcttcacttgactggcttcatagaaccccaaagccaccccaccaccacataaattgtgtctctaggttctgtgttgctcacactcaaaatttctgggccttctcatttggtgcatgtgaatggtgcatatgagtgaagtctaggatggggccttagcgttaaagccctggggtagtgtgactgagattgttggtaaagaatgtgcagtggttggcatgacctcagaaattctgaaatgggactgcacctgcagactgaagtgttcagagagccagggaggtgcaaggactggggagggtagaggcaggaaccctgcctgccaggaagagctagcatcctgggggcagaaaggctgtgctttcaagtagcagcagatgtattggtatctttgtaatggagaagcatactttacaggaacattaggccagattgtctaaccagagtatctctacctgcttaaaatctaagtagttttcttgtcctttgcagtatcttatcaaacatccatgaagtacatcagaacatgggctactgccctcagtttgatgccatcacagagctgttgactgggagagaacacgtggagttctttgcccttttgagaggagtcccagagaaagaagttggcaaggtactgtgggcacctgaaagccagcctgtctcctttggcatcctgacaatatataccttatggcttttccacacgcattgacttcaggctgtttttcctcatgaatgcagcagcacaaaatgctggttctttgtatctgctttcagggtggaaacctgtaacggtggtggggcagggctgggtgggcagagagggagtgctgctcccaccacacgagtcccttctccctgctttggctcctcaccagttgtcaggttatgattatagaatctagtcctactcagtgaaagaactttcatacatgtatgtgtaggacagcatgataaaattcccaagccagaccaaagtcaaggtgctttttatcactgtaggttggtgagtgggcgattcggaaactgggcctcgtgaagtatggagaaaaatatgctggtaactatagtggaggcaacaaacgcaagctctctacagccatggctttgatcggcgggcctcctgtggtgtttctggtgagtataactgtggatggaaaactgttgttctggcctgagtggaaaacatgactgttcaaaagtcctatatgtccagggctgttgtatgattggcttgtcttcccccagggacagcagagcaaccttggaaaagcagagggaagcttctcccttggcacacactggggtggctgtaccatgcctgcagatgctcccaaatagaggcactccaagcactttgtttcttagcgtgattgaggctggatatgtgatttgatctttctctggaacattctttctaatcatctttgtgttcattccctgaaaatgaagagtgtggacacagctttaaaatccccaaggtagcaactaggtcatagttccttacacacggatagatgaaaaacagatcagactgggaagtggcccttgaccttttttcttctgtagataagagcattgatgttattacgggaagaagcctttgaggcttttatgtattccacctcggtctggaatttgtttctgtaaggctaacagttgcaatatactagggtaatctgagtgagctggaattaaaaaaaaaaaggaatttcaccccaatcttatactgacttcaatagaggtttcagacaaaaagttgttttgtatatacttatcagtcatgaaaagataattacaactaaatggcctttttccttccctatttatttggagaaatttaattacataaaaaagtactcagaatatttgagtttcctgcatcaataagacatttataataatgaccttgtttacaaatgaatttgaaagttactctaattctttgattcatcaagaaataactagaatggcaagttaaaatttaagctgtttcaaagatgcttctgcatttaaaaacaaatttatctttgattttttttccccccagcaaataagacttattttattctaattacaggatgaacccaccacaggcatggatcccaaagcccggcggttcttgtggaattgtgccctaagtgttgtcaaggaggggagatcagtagtgcttacatctcataggtccgtagtaaagtcttgggttcctcactgtgggatgttttaactttccaagtagaatatgcgatcattttgtaaaaattagaaaatacagaaaagcaaagagtaaaacaattattacctgaaattatatatgcatattcttacaaaaatgcaagcccagtataaatactgctctttttcacttaatatattgtaaacattattccaagtcagtgcatttaggtgtcatttcttatagctggatagtattccattaggatatactcttatttaactattcccccttttgtagacatttggattatttccaacttgttcacaattgtaaacaccactacactgaacagcatcatccctatatccacatgtacttgtaacagaatacaattccctaggaagctggaatgctggaagtcatggtgatgttctcatggttacagagaatctctctaaaactaaaacctctttctgttttaccgcagtatggaagaatgtgaagctctttgcactaggatggcaatcatggtcaatggaaggttcaggtgccttggcagtgtccagcatctaaaaaataggtaataaagataatttctttgggatagtgcctagtgagaaggcttgatatttattcttttgtgagtatataaatggtgcctctaacataaagggaaataaaactgagcaaaacagtatagtggaaagaatgagggctttgaagtccgaactgcattcaaattctgtctttaccatttactggttctgtgactcttgggcaagtgacttaactactgtaagagttagtttccctggaagatctacctcctagctttgtgctatagatgaaatgaaaaaaatttacatgtgccagtactggtgagagcgcaagctttggagtcaaacacaaatgggtttgcatcctggccctaccaattatgagctctgagccatgggcaagtgactaactccctgggcctcagtttctctgtaacatctgtcagacttcatgggtccaggtgaggattaaaggagatcatgtatttacagcacatggcatggtgcttcacataaaataagtatttagtaaatgataactggttccttctctcagaaacttatttctgggcctgccaggggccgccctttttcatggcacaagttgggttcccagggttcagtattcttttaaatagttttctggagatcctccatttgggtattttttcctgctttcaggtttggagatggttatacaatagttgtacgaatagcagggtccaacccggacctgaagcctgtccaggatttctttggacttgcatttcctggaagtgttctaaaagagaaacaccggaacatgctacaataccagcttccatcttcattatcttctctggccaggatattcagcatcctctcccagagcaaaaagcgactccacatagaagactactctgtttctcagacaacacttgaccaagtaagctttgagtgtcaaaacagatttacttctcagggtgtggattcctgccccgacactcccgcccataggtccaagagcagtttgtatcttgaattggtgcttgaattcctgatctactattcctagctatgctttttactaaacctctctgaacctgaaaagggagatgatgcctatgtactctataggattattgtgagaatttactgtaataataaccataaaaactaccatttagtgagcacctaccatgggccaggcattttacttggtgcctaatcctatttaaattagataaaaaagtaccaaataggtcctgacacttaagaagtactcagtaaatattttcttccctcttccctttaatcaagaccgtatgtgccaaagtaaatggatgactgagcagttggtgatgtaggggtggggggcgatatagaaagtcagtttttggccgggcgtggtggctcatgcctgtaatcccagcactttgggaggctgaggagcaggcagatcatgaggtcaggagatccagataatcctggccaacagggtgaaaccccgtctctactaaaaatacaaaaattagctgggcatggtggtgcgcacttgtagtcccagctacttgcgaggctgaggcaggagaattgctcgaacccaggaggtggaggttacagtgagccaaggtctcgccactgcactccagcctggggacagagcaagaccccatttcaaggggggaaaaaaagtctatttttaagttgttattgcttttttcaagtattcttccctccttcacacacagttttctagttaatccatttatgtaattctgtatgctcctacttgacctaatttcaacatctggaaaaatagaactagaataaagaatgagcaagttgagtggtatttataaaggtccatcttaatcttttaacaggtatttgtgaactttgccaaggaccaaagtgatgatgaccacttaaaagacctctcattacacaaaaaccagacagtagtggacgttgcagttctcacatcttttctacaggatgagaaagtgaaagaaagctatgtatgaagaatcctgttcatacggggtggctgaaagtaaagaggaactagactttcctttgcaccatgtgaagtgttgtggagaaaagagccagaagttgatgtgggaagaagtaaactggatactgtactgatactattcaatgcaatgcaattcaatgcaatgaaaacaaaattccattacaggggcagtgcctttgtagcctatgtcttgtatggctctcaagtgaaagacttgaatttagttttttacctatacctatgtgaaactctattatggaacccaatggacatatgggtttgaactcacacttttttttttttttttgttcctgtgtattctcattggggttgcaacaataattcatcaagtaatcatggccagcgattattgatcaaaatcaaaaggtaatgcacatcctcattcactaagccatgccatgcccaggagactggtttcccggtgacacatccattgctggcaatgagtgtgccagagttattagtgccaagtttttcagaaagtttgaagcaccatggtgtgtcatgctcacttttgtgaaagctgctctgctcagagtctatcaacattgaatatcagttgacagaatggtgccatgcgtggctaacatcctgctttgattccctctgataagctgttctggtggcagtaacatgcaacaaaaatgtgggtgtctccaggcacgggaaacttggttccattgttatattgtcctatgcttcgagccatgggtctacagggtcatccttatgagactcttaaatatacttagatcctggtaagaggcaaagaatcaacagccaaactgctggggctgcaagctgctgaagccagggcatgggattaaagagattgtgcgttcaaacctagggaagcctgtgcccatttgtcctgactgtctgctaacatggtacactgcatctcaagatgtttatctgacacaagtgtattatttctggctttttgaattaatctagaaaatgaaaagatggagttgtattttgacaaaaatgtttgtactttttaatgttatttggaattttaagttctatcagtgacttctgaatccttagaatggcctctttgtagaaccctgtggtatagaggagtatggccactgccccactatttttattttcttatgtaagtttgcatatcagtcatgactagtgcctagaaagcaatgtgatggtcaggatctcatgacattatatttgagtttctttcagatcatttaggatactcttaatctcacttcatcaatcaaatattttttgagtgtatgctgtagctgaaagagtatgtacgtacgtataagactagagagatattaagtctcagtacacttcctgtgccatgttattcagctcactggtttacaaatataggttgtcttgtggttgtaggagcccactgtaacaatactgggcagcctttttttttttttttttaattgcaacaatgcaaaagccaagaaagtataagggtcacaagtctaaacaatgaattcttcaacagggaaaacagctagcttgaaaacttgctgaaaaacacaacttgtgtttatggcatttagtaccttcaaataattggctttgcagatattggataccccattaaatctgacagtctcaaatttttcatctcttcaatcactagtcaagaaaaatataaaaacaacaaatacttccatatggagcatttttcagagttttctaacccagtcttatttttctagtcagtaaacatttgtaaaaatactgtttcactaatacttactgttaactgtcttgagagaaaagaaaaatatgagagaactattgtttggggaagttcaagtgatctttcaatatcattactaacttcttccactttttccagaatttgaatattaacgctaaaggtgtaagacttcagatttcaaattaatctttctatattttttaaatttacagaatattatataacccactgctgaaaaagaaaaaaatgattgttttagaagttaaagtcaatattgattttaaatataagtaatgaaggcatatttccaataactagtgatatggcatcgttgcattttacagtatcttcaaaaatacagaatttatagaataatttctcctcatttaatatttttcaaaatcaaagttatggtttcctcattttactaaaatcgtattctaattcttcattatagtaaatctatgagcaactccttacttcggttcctctgatttcaaggccatattttaaaaaatcaaaaggcactgtgaactattttgaagaaaacacaacattttaatacagattgaaaggacctcttctgaagctagaaacaatctatagttatacatcttcattaatactgtgttaccttttaaaatagtaattttttacattttcctgtgtaaacctaattgtggtagaaatttttaccaactctatactcaatcaagcaaaatttctgtatattccctgtggaatgtacctatgtgagtttcagaaattctcaaaatacgtgttcaaaaatttctgcttttgcatctttgggacacctcagaaaacttattaacaactgtgaatatgagaaatacagaagaaaataataagccctctatacataaatgcccagcacaattcattgttaaaaaacaaccaaacctcacactactgtatttcattatctgtactgaaagcaaatgctttgtgactattaaatgttgcacatcattcattcactgtatagtaatcattgactaaagccatttgtctgtgttttcttcttgtggttgtatatatcaggtaaaatattttccaaagagccatgtgtcatgtaatactgaaccactttgatattgagacattaatttgtacccttgttattatctactagtaataatgtaatactgtagaaatattgctctaattcttttcaaaattgttgcatcccccttagaatgtttctatttccataaggatttaggtatgctattatcccttcttataccctaagatgaagctgtttttgtgctctttgttcatcattggccctcattccaagcactttacgctgtctgtaatgggatctatttttgcactggaatatctgagaattgcaaaactagacaaaagtttcacaacagatttctaagttaaatcattttcattaaaaggaaaaaagaaaaaaaattttgtatgtcaataactttatatgaagtattaaaatgcatatttctatgttgtaatataatgagtcacaaaataaagctgtgacagttctgttggtctacagaaatttacttttgtgcatttgtggcaccacctactgttgaagggttataaagccattagaaaagtagaggggaagtgatttggatcaaaaggaaaaactttagaaaagattcaaatgttcccttaatcataaaagagaactgaggggactacttgaaaataaaaggttgttttgtattttcatgttggttaagatactgagtaactggtattaagtgttagaggtttttagataaatattctgcttaatgattatgaagctgcactgagatttctgaaaatgctctgtagctgagcttatttaataaatgttcacttggtataggggaagctacaaaggcagccttcagtgtccttttgtttattcaaccaaaaatataaggacacaatgtagcagttatactgggaaggtgctgggggtggtggcaatggtgagcaggaaggcgaagtagatatggaaacagaaatgatactaatatcggtgattccttccttttttcctgtaataagtgctgtgcagacaacatatgagcagtgctgataaatgtaaatgtatttttcatagctcattaagaatcagtttcagaaagagatgtctgcttattttgctacttgaagaatccctgtcaaacagtccttttgaggaagtacaagaggctgtctctatttgtgacctcaggaatggctgtgacagtgtcgtgagcagtccttttcctgtggcacagatctgaactttgtgtgcagaaaaatcttggcttcaagtgagccaagatgccccctgagcatcagcatcacaacttcatcctcctatcttgaagttcatgttatagtgactttaatgaaatcatagaacactgtttcttcgtgaacaatgacgagggagaggaaaaaactttattgaaaaataaaaaggcaggtaatttagatgaaaatatgttacccatgaggttttgtttttgctttttgtttttgtttttgagaaacagaatctcgctctgtcgtccaggctggagtgcagcggcatgatcttggctcactgcaacctccgcctcccgggttcaagcgattctcctcagcttcccaagtagctggtactacaggcatgcgccaccacaaccagctaatttttgtatttttagtagagatggggtttcactatacgttggccaggctggtctcaaactcctgacctaaggtgatccttctgccttgggctcccaaagtgctgggattacaggcatgagccaccttgcctggccctacccatgagccttgactaaaacattcttctatctgtagaaaagcccaaaagaacttttccagattcaaaaaacttggcactttgtaatggtaatgtttacattaagtaaaaaaaaaaaaaaaacccacttagcttcagttttcaagtgtttactgtgttgtcatgcacttcatttaattctcaacacctgccctatgaggtaaaaagtaccattttacatatgagtaaattacagctcagtggataagaaactcgtccaaaggtacaggttcagtcaagtggcagagggttctttttgttgaagttaggtatcagttaaaattgaccttgtaaaatcacatcagcatcaatatacattaatttaacaaatatttattgaactttactgtatgccagatacttctctaggtactagggggtacaatgtagaagaaaatagaattcctgctctaatgaatttatatttcagtggtgaaagatgatgtgtggacaaacacatctaatgtattttgacagcaatgggtgctaagaagaaaataagacatggtaattggataacaatggagagaagtcagagatggccttttctgaggagtgacatgctcagaatcgaataaaaagagcaggagcagcctttcaaggtgggtgcgaaggatattcccggaagaaagaataagtgttgcaaaagccccagtgggaaaaagcttggcaagctgaggtggtaaaagagctatctgtactaatgtctcttgtactgagttagcaaggacaagagtggcagggggtggaactggagagatagcagggaccacatctcacaggatctcgccagcctttttaaggtatttggattttattgttagtgcaacaaggagccactggagagttttaaacagtagtggtgtgacctactgtttcagaaagaacactggctactatgggaagaaaggacagtaggaagactaatagataatggtggattgaactaagatggtagcaacagatagggagctatggtaatgttcagtatccactttggagatagatccagcaggacttgctgacagactgcatgtaagggctgagggaaagagagctagcaaggtgacttctagtttgtgacctgaactaggtagatggttgtgttaaaaatgcagtgggtatttcagtctgaagctcaggggcaatgatggaaaataagataaatgtgtgcaagttggctgggcgtggtggtgcacgcctataatcacagcactttgggaggccgagacgggtggatcacttgaggtcaggcgtttgcgaccagcctaacatggtgaaaccccatctctaataaatacaaaaaaattagctgggcatggtggtgcatgcctgtaatccaagctacttgggaggctgagacaagagaatcgcttgcacctgggaggcggaggtttcagtgagctgagatcgcaccattgcactccagcctgggcaacaagagcgaaactccatctaaaaaaaaaagtgtgcaagttattggtacgtatatatttaagcctcgggactgaatgagattacctagagagaatgaagatagggaacattcttgagcctgagatcctataacatttagaagagaagctagccagggaaattgagagggactggccagtgagagagagtaaaatctgaagagtataatgccatatgttgaagctcagagaattattgtttcaggaaggcagaagttgtcaattatgtccaacattgctgagaagatgagtaaggaatgtaaatgagtaaaggcaggaatggctattgaatttgttaagacagaggtccttggtgaccttcctaagagtcatttcagcatgacaaggatgcagacctaactggaatagattttcagggaagactgagaggcaaggaaggggagactgcaaatatatgcaaatctatatttttgctttgaagggaaacagaaaacaggacaacagctggtttacagaacttttatttggattctttccttgtctgttaataatataggctgcacctgggcatcatcgtgcccttcctttttgattctgctgttttgcttttaatcctacaggcatttcttctggcaggagccttgtacacactctgggtggttcatgaccaccacggacttgccctttcaaggcagaagcctgtgattcaaaaacttccattccttccaatcgactattataaaactcattttgtctagtgcccatactcctttaccttaggatcctgggccaactgtcactaaagaaaacaaaccatttcctcctcctgggggaatgtgcttctttcaagaaggtgcttagagaatagacattctaggtgacagcagttatgaaagaggtgtctctaatgaacctaacacttcttccaacatactccaggttcaccctcctttgaagacagaaagtactacaacttcagttgccaccctagtcaggttcataggatttactcagtaggttaagagatggtgctgagaatgaagtccagagtttgagtctacaagtggcatttgcttctcctttgggacttctgtggcagggtgtggaaccaaatcagattggttgcatatctgtttctcttcctgaaaatacaattcaaataccttcatagtctgtgacagcaacttataaccaacagacaatggtattatttttatttattgatggcactcccccatagccagaacttctactgagtcattcatcgtgtattccaggaatactttccaaatggagtagtgaggcacttccaataacagttatgtaatctgttaacagtggctcaaaatgacatgtgaaggaatgatgtacttcttttttcagactcacagatctcatatgttaattcagtcaacaagtacttagggcttatcacatgccaggcacaggtaatatgacaataatgaaaacaaaaacccttgctgtcatagaattcggtttctagtgggaagagacatacattaacaaatcatatataagtaaaacattaattatggtgataacagaaaaagaaagcaggggagagggatagtgtcttagttcaggttgctgtaacaagagtaccatagacagggtggcttaaacaacaaacatttctttctcacagatctagtggctgggaagtctaagaccagggtgccagcatgaagaagttctggtgaaggcttacattctggtttcctcacagtgagggctcttcacgcccttataaatgcactaattctattacccacatgacctcatctaaaactaactcacaaaggccaaacctcctatgttgagattaaggcttcaacataggaattttggggggacaaaaacattcagtctctagcagataggggccactgtgggaggggattacaatcttaaatagggttgtcagggaaggcttcatgagggcaaagacctgaggaggcatggaaatgatccacgcagatgcatgtctggggaagagcattccaggcagaggcagtgggaatggaccctcaggtaagagcatgtttagcaagttcagagaaaagcctcttaggtcaggtctggagcgagagtggaaaatgtaacaggacagatcatgtaaagacttgtagaccacagttagaggcttggacaataactctgaggatgacatgaaggtattgggagggggtgttgagcagaggagtgatatgatctggtttatattttagattattctgactgctatgttgaaaatagggttgagagcagaggggaagggcagcacaccagttaagaccacttcccaaaaatccagatgatgatgggcttgaaccaggagagttgctatagggatgtgaagcaatcaaattctagatatttgggacctgctgacaggtacataatggtgtatgagagaaaaggcagtgtgagaatgactctgaagtctgtggcctgagcaaaacagaaacctggagttgccaatagctgagataaagtttctggttaaagatcaagagctcagttttggacaagaggggtgtgagatttctaatagacattcaggtggaggtgtggggaacacacctggatgtgatgagcctggaattcaaattcacatgtgtgaatttgaaaaaagattcagaaaagaggtgtggactggaggagctatccacacacagatagcatttgaagccacaagactgggggtgatgacgcagggagtaagtataaatagaaaagagaagtggtccaaggactcagtccttacatcagaggtcaaagagacaagatggagactaggagatatgaaggcttgtgcagtgagtgtttcggagaaacgaagaaacttcccagaagaaaggagaggtcaactgctaacaagtcaagtgaaatgagaactgggaaatgagttgacaagagcaatttggctggcgtgatcagagaatgtttaagagataatgtgagggaagaaaatggaggcaggaagtatgaactactcttttgagtcatattgtaaaggaaaaaaatggggtgattttactcttttttttttttaaagataggaaaaaaaagtatatttatatgctgaggagaagaatccagttgaaggggaatactgtggcttcaggagacaggaaaactgcctaagccacatccttcagcaagtgagtgttcaagtggagggtttgtctttgcttggggcacgggcggttcatccacagtgaaaggagagaaggcagggcatgtggggttggctgtagaaagcgggcagacggggtgggaacttatgaagactcttctgattgttattttctctgttaagtaaaaggaaaggtcattggctaagaatgaagatggacgcgcaggtgctgggagtcatcgaagagaatgaaagaatgaataaaatagagaaaaatacaatgctattatataaacctatacatttaaattactttcctcttcaaattagaccccctggaaggcaaatctctgtcatgttaagttttaggaaaagtcataatctacttggagctaagtatgaagaataaggtatatgatttaaaccacataattctatttttgcttaaaccggggaagcctttaaggtaacgtagagtgtacccattaaaaaagataaaaatgtcagcttccccttccctttaaatatagtaaggctcaaaggtaattgatgttcataaccctaaggtactataacagtctgaagcaaaatattaaatgtcttctgtagtattttagttaacttttaattttattggtaatttatgtgtagttaaccacatacttgtgcctcaactatttcacataaatgtgagatgtcttaggcctctttgaactctgcatggaaaagaatgctgaggaggtatgtctgtttaagctgccactgcctgcctctcataaataatatctcacattgcataatagcccagataaactgcagatcgcttagagcctgataaatgagaggaaactgtacagtttgttttccaaattgcccttggacagctaattcacaatttactattttatagctgtaagattttaaaaatataaaataacatagctgtaaatacagattatcagaagatagtctgtaaaaatgtaaatataatatagctgtaaatatacactatcggaagtaccaaatctagttttagtaggtagaggcatcaagtaaaatggaaatgaaagatgtttcaaggaaaactccaggacatctgtggcagtactaaagaaaccttccttctcaggttcccagcatgctattttattgatgtaacaacattttcaataaagttggtaaattatcactatattactgtcttatagcaacatagcaagagctttagagatcatataagtataaaatgtgaatttaaaaaaacaatgaatatgcaggatttttattagggcaagcgtttccataaccataaatatttctttaaaacaaataaatgtcccaagatctctgttagtgatccaaactaagtagaaattagtaaaattaattataaatgaacaatttcagcatataaaccaacaagtcttttctagatttttaacactgtgacccaattgcattattttccaagttagaatgactaataatcaatgaatgtaaaagcaataattaatacagatgacattgtacttttccacagtaaagaaataaacaatctaatatttttataaatcccattttatatcacaaaataacctttactaagcaaatttttttaaaatctcaggaactatagacatgatgaaaagatagatattttatataaataattcaaaaatactgtcaggcaaggaaatgtaaaatccttatttgagtaaaagaaaatgctataaagcaatgagttatcaaaatacagaagaggtattctaaaacaaatgaaaaaccaagatgatgaaatagtgacaactacttctaatgtgtaacagatactgaaatgccaaggtgaaagtgaactgaattatttcttaaagcagtggagaatatgtaactttcaaaaatgcaagaagcacagcaaattaactaattaacttaccacctccttcaaataaaagcgagaacctcttgggagaatttaagcaccattagcagacacatcttagagcagttaatgaaatgttttgtatttcagtagaaaactatttcaatggtgaaaatgatgcaggaatcagaagcatattctgctgagaaactaggtagttgacactttcccgaactggaaaaacatttcataagaaggcatacagttattggttgaatcacatttgttctaaaaataattcgtgcttagtgaaacagcttaccagccgccacaactctgggatcctcatgggacttatgtctcccagctgcacgactatctgcactctcattccaccaaagaacatgaactgcagaaataaaccacaagtagtttctgaaatatatggcaatagcaaataagaaatattgaaaaagtgaatcagaaatgttgtcttattctttaaatcaaaatcaaaaggtaaaactaaatatgttagttataagatttcagagggatcagaaatttggaagataaatttataagttaaactggaaacataaggctgaagagagaatgcaaagaaacacagcttaaggcacaattaagactagacccgagtttaatgacttcctactatgttttattttttaaaaaaagcagattataaaaaattgtttactgtagaaaatttaggtgatacaaagaaaaaataaaagttagtataatcttaactgcctagataaacctttatcaacatatggtgtgtttcctttaaaaaaaattagtaaaccaaattagggtcttagtgtatattatacttagtaacagattttttaaaatgctgcaacaatgtgagaattttctatgtcaatgatattaattttgaatgacaaagacaccaaaaacaatcatgataaaaacaaaaattgacaaatggtatctaattacacttaagagcttctgcacagcaaaaaaaaaaacaaaaaaaaaactgtcaacagagtaaacagacaacctccagaatgggagaaaatttttgcaaactacgcatctgacaaaggcctaatatccagcctctataaggaacttaaacaagtttataagagaaaaaaagaatcccattaaaaagtaggtaaagggcatgaatagtcacttttctaaagaagacatatatgagaccaacaaacttatgagaaaatgctcaatatcactgatcattagagaatgcaaatataaaccacaattagataccatctcacaccagtcagaatgcctgttactaaaaagtcaaaaaataacagatgctggtgaggttgtgaaaaaaagggaacacttacaccctgttggtgggagtgtaaattagttcaaccattatggaaagcagtatggtgattcctcaaagagctaaaagcagaactgccattcgacccaacaatcccattactggatatatacccagagaaatataaatcattttaccataaagacatgtgcacgtgaatgttcactgcagcactattcacaatagcaaaaacttggaatcttttcatgaaaacctatatgcccaccaacaacagattggataaagaaaatgtggtacatacacaccatggaataccatgcagccataaaaaagaaccagattataacttttgtgggaacatggatgtagctagaggctattatcctcagcaaaccaacagaggaaaagaaaaccagataccacatgttctcacttataaacgggagctaaatgatgagaatttatgaacacaaagaaggaaacaacagacactggggtctacttgagaatggaagatgggaggagggagaggattagaaaagataacaattgggtactgggcttaatacctgagtgattaaataatctgtacaacaaacccccatgacatgggtttacctaagtaacaaatcttcacatgtaccccgtgaacctaaaataaaagttaaaaaacaaacaccagttcagcatttgaaaaaggctccataaagtattaacattctaaaaaaataagatgtaaaataagatgcttatagattttttcaatcctataaacaacaaactctaaaaatttggagataaaaattaaaacaggtaccaaaatgaaaaagagagacgaactgatctaatacacatggcaacttcatagaacaaatggacaactgtacctctgttgagttctccatattctgtgtggaaaacaccaactacttttgtgtagcctaaattgacatgggcattaattgctctttcaaatgcatcaccccacagagctggcccaccaggtttcatctgaaaaacagctagttcatagactcctagaatagggagaaaaataattatttcacagaagacattcaaacaatttctaaccaggttttcctgatttcattagaaggctaaccaatgaagttagaggataatccatgtatacatacatatgcagtcacatttattgattctctgcattatttttctttgcttttatgtttagaaagtctttgtccatgtttaagggtcagttgttaaaattaatcataaagaaaataaagaaaaaggactggaagctatatataaactacactctgaaatatttttaatctataaaatttgtcaggaaaacagatactgagaatgtataatgaagcagaattttcaagctgcctgtctacactttttaaaaaagaaatgcataagagaagtactttctgatatcctacatttccttctccttttcaattttgagaggaaataactttttcctttgtataattttctccggtaggattctatttctagttgacccaaagtcatgtctgagcctttaaggaaaaaaagaaaaccctcaaggagatggttttattcttcctaaatatccaggtaaatgcttaaaaaccattctaccttctggccagaagtataagatgggtggagagaaagaaactagaggacaaggtagattggacaagaaaaaggaaagaaatacaaagttactaaagaattatgaacaacatagaggaagggaactattaataagacttgacactgagaagtcaactgttttacttagtgctgaaagttaaggggagttttaagtacattagaatccaaacaagacttttcaaatctcttataatctaaaataaaatacaaagttgagtttatgggagacataaaatgaaatttaaattagtttatgcttttcgaatctgacctctgtttaaaattagatagaggtaattatttcctttagtgagcaagaagtgaaatcaggaagaagacaaatcttttcaaactgagaaacaagaaagaggaagacacaaaagttaaactacaataatgtagcttagcagtgtaagttaattcattcccccaaaacagtcagtttacaagcaaagatgtacttaatgatttaagattagctgactttgtggaaaaaatacttttatatttaaaagtttatacattttaaaactgtgacaaaatttcatgaactacgactcatctacctacacctgttttcctagctcccaagccccactttttcacctgtattgaccatgtcaacttttgttaggcatccgttagatttcaatatggaaaaatacttcattttttgttttaaggataagcaatgtttaaggataagctcaatgttttaaggataagcaaagagctctagaactctaattctcttttttttttttttttttgagacggagtctcgctctgtcgcccaggctggagtgcagtggcgagatctcggctcactggaagctccgccttctgggttcacgccattcccctgcctcagcctccctagtagctgggactacaggcatgcaccaccacacccagctaatttttgtatttttggtagagatggggcttcactacgttgaccaggcggatcttgaattcttgacctcaagtgattcgcccgcctcggccttccaaagtgctgagattataggcgtgagccaccgcgcccagtctctaattcatttttatctccagactcatcatatattattatataaaacaaagaattatatatttttttcctatagaactttactctttataactttaggtctttagtattttactcattaaaactcatagtctaagagggaagaactcaccttcttttggaggcttttc

SEQ ID NO: 616 - DNA, 171244 bp, Homo sapiens
gaaaagcctccaaaagaaggtgagttcttccctcttagactatgagttttaatgagtaaaatactaaagacctaaagttataaagagtaaagttctataggaaaaaaatatataattctttgttttatataataatatatgatgagtctggagataaaaatgaattagagactgggcgcggtggctcacgcctataatctcagcactttggaaggccgaggcgggcgaatcacttgaggtcaagaattcaagatccgcctggtcaacgtagtgaagccccatctctaccaaaaatacaaaaattagctgggtgtggtggtgcatgcctgtagtcccagctactagggaggctgaggcaggggaatggcgtgaacccagaaggcggagcttccagtgagccgagatctcgccactgcactccagcctgggcgacagagcgagactccgtctcaaaaaaaaaaaaaaaaaagagaattagagttctagagctctttgcttatccttaaaacattgagcttatccttaaacattgcttatccttaaaacaaaaaatgaagtatttttccatattgaaatctaacggatgcctaacaaaagttgacatggtcaatacaggtgaaaaagtggggcttgggagctaggaaaacaggtgtaggtagatgagtcgtagttcatgaaattttgtcacagttttaaaatgtataaacttttaaatataaaagtattttttccacaaagtcagctaatcttaaatcattaagtacatctttgcttgtaaactgactgttttgggggaatgaattaacttacactgctaagctacattattgtagtttaacttttgtgtcttcctctttcttgtttctcagtttgaaaagatttgtcttcttcctgatttcacttcttgctcactaaaggaaataattacctctatctaattttaaacagaggtcagattcgaaaagcataaactaatttaaatttcattttatgtctcccataaactcaactttgtattttattttagattataagagatttgaaaagtcttgtttggattctaatgtacttaaaactccccttaactttcagcactaagtaaaacagttgacttctcagtgtcaagtcttattaatagttcccttcctctatgttgttcataattctttagtaactttgtatttctttcctttttcttgtccaatctaccttgtcctctagtttctttctctccacccatcttatacttctggccagaaggtagaatggtttttaagcatttacctggatatttaggaagaataaaaccatctccttgagggttttctttttttccttaaaggctcagacatgactttgggtcaactagaaatagaatcctaccggagaaaattatacaaaggaaaaagttatttcctctcaaaattgaaaaggagaaggaaatgtaggatatcagaaagtacttctcttatgcatttcttttttaaaaagtgtagacaggcagcttgaaaattctgcttcattatacattctcagtatctgttttcctgacaaattttatagattaaaaatatttcagagtgtagtttatatatagcttccagtcctttttctttattttctttatgattaattttaacaactgacccttaaacatggacaaagactttctaaacataaaagcaaagaaaaataatgcagagaatcaataaatgtgactgcatatgtatgtatacatggattatcctctaacttcattggttagccttctaatgaaatcaggaaaacctggttagaaattgtttgaatgtcttctgtgaaataattatttttctccctattctaggagtctatgaactagctgtttttcagatgaaacctggtgggccagctctgtggggtgatgcatttgaaagagcaattaatgcccatgtcaatttaggctacacaaaagtagttggtgttttccacacagaatatggagaactcaacagaggtacagttgtccatttgttctatgaagttgccatgtgtattagatcagttcgtctctctttttcattttggtacctgttttaatttttatctccaaatttttagagtttgttgtttataggattgaaaaaatctataagcatcttattttacatcttatttttttagaatgttaatactttatggagcctttttcaaatgctgaactggtgtttgttttttaacttttattttaggttcacggggtacatgtgaagatttgttacttaggtaaacccatgtcatgggggtttgttgtacagattatttaatcactcaggtattaagcccagtacccaattgttatcttttctaatcctctccctcctcccatcttccattctcaagtagaccccagtgtctgttgtttccttctttgtgttcataaattctcatcatttagctcccgtttataagtgagaacatgtggtatctggttttcttttcctctgttggtttgctgaggataatagcctctagctacatccatgttcccacaaaagttataatctggttcttttttatggctgcatggtattccatggtgtgtatgtaccacattttctttatccaatctgttgttggtgggcatataggttttcatgaaaagattccaagtttttgctattgtgaatagtgctgcagtgaacattcacgtgcacatgtctttatggtaaaatgatttatatttctctgggtatatatccagtaatgggattgttgggtcgaatggcagttctgcttttagctctttgaggaatcaccatactgctttccataatggttgaactaatttacactcccaccaacagggtgtaagtgttccctttttttcacaacctcaccagcatctgttattttttgactttttagtaacaggcattctgactggtgtgagatggtatctaattgtggtttatatttgcattctctaatgatcagtgatattgagcattttctcataagtttgttggtctcatatatgtcttctttagaaaagtgactattcatgccctttacctactttttaatgggattctttttttctcttataaacttgtttaagttccttatagaggctggatattaggcctttgtcagatgcgtagtttgcaaaaattttctcccattctggaggttgtctgtttactctgttgacagttttttttttgtttttttttttgctgtgcagaagctcttaagtgtaattagataccatttgtcaatttttgtttttatcatgattgtttttggtgtctttgtcattcaaaattaatatcattgacatagaaaattctcacattgttgcagcattttaaaaaatctgttactaagtataatatacactaagaccctaatttggtttactaattttttttaaaggaaacacaccatatgttgataaaggtttatctaggcagttaagattatactaacttttattttttctttgtatcacctaaattttctacagtaaacaattttttataatctgctttttttaaaaaataaaacatagtaggaagtcattaaactcgggtctagtcttaattgtgccttaagctgtgtttctttgcattctctcttcagccttatgtttccagtttaacttataaatttatcttccaaatttctgatccctctgaaatcttataactaacatatttagttttaccttttgattttgatttaaagaataagacaacatttctgattcactttttcaatatttcttatttgctattgccatatatttcagaaactacttgtggtttatttctgcagttcatgttctttggtggaatgagagtgcagatagtcgtgcagctgggagacataagtcccatgaggatcccagagttgtggcggctggtaagctgtttcactaagcacgaattatttttagaacaaatgtgattcaaccaataactgtatgccttcttatgaaatgtttttccagttcgggaaagtgtcaactacctagtttctcagcagaatatgcttctgattcctgcatcattttcaccattgaaatagttttctactgaaatacaaaacatttcattaactgctctaagatgtgtctgctaatggtgcttaaattctcccaagaggttctcgcttttatttgaaggaggtggtaagttaattagttaatttgctgtgcttcttgcatttttgaaagttacatattctccactgctttaagaaataattcagttcactttcaccttggcatttcagtatctgttacacattagaagtagttgtcactatttcatcatcttggtttttcatttgttttagaatacctcttctgtattttgataactcattgctttatagcattttcttttactcaaataaggattttacatttccttgcctgacagtatttttgaattatttatataaaatatctatcttttcatcatgtctatagttcctgagattttaaaaaaatttgcttagtaaaggttattttgtgatataaaatgggatttataaaaatattagattgtttatttctttactgtggaaaagtacaatgtcatctgtattaattattgcttttacattcattgattattagtcattctaacttggaaaataatgcaattgggtcacagtgttaaaaatctagaaaagacttgttggtttatatgctgaaattgttcatttataattaattttactaatttctacttagtttggatcactaacagagatcttgggacatttatttgttttaaagaaatatttatggttatggaaacgcttgccctaataaaaatcctgcatattcattgtttttttaaattcacattttatacttatatgatctctaaagctcttgctatgttgctataagacagtaatatagtgataatttaccaactttattgaaaatgttgttacatcaataaaatagcatgctgggaacctgagaaggaaggtttctttagtactgccacagatgtcctggagttttccttgaaacatctttcatttccattttacttgatgcctctacctactaaaactagatttggtacttccgatagtgtatatttacagctatattatatttacatttttacagactatcttctgataatctgtatttacagctatgttattttatatttttaaaatcttacagctataaaatagtaaattgtgaattagctgtccaagggcaatttggaaaacaaactgtacagtttcctctcatttatcaggctctaagcgatctgcagtttatctgggctattatgcaatgtgagatattatttatgagaggcaggcagtggcagcttaaacagacatacctcctcagcattcttttccatgcagagttcaaagaggcctaagacatctcacatttatgtgaaatagttgaggcacaagtatgtggttaactacacataaattaccaataaaattaaaagttaactaaaatactacagaagacatttaatattttgcttcagactgttatagtaccttagggttatgaacatcaattacctttgagccttactatatttaaagggaaggggaagctgacatttttatcttttttaatgggtacactctacgttaccttaaaggcttccccggtttaagcaaaaatagaattatgtggtttaaatcatataccttattcttcatacttagctccaagtagattatgacttttcctaaaacttaacatgacagagatttgccttccagggggtctaatttgaagaggaaagtaatttaaatgtataggtttatataatagcattgtatttttctctattttattcattctttcattctcttcgatgactcccagcacctgcgcgtccatcttcattcttagccaatgacctttccttttacttaacagagaaaataacaatcagaagagtcttcataagttcccaccccgtctgcccgctttctacagccaaccccacatgccctgccttctctcctttcactgtggatgaaccgcccgtgccccaagcaaagacaaaccctccacttgaacactcacttgctgaaggatgtggcttaggcagttttcctgtctcctgaagccacagtattccccttcaactggattcttctcctcagcatataaatatacttttttttcctatctttaaaaaaaaaaaagagtaaaatcaccccatttttttcctttacaatatgactcaaaagagtagttcatacttcctgcctccattttcttccctcacattatctcttaaacattctctgatcacgccagccaaattgctcttgtcaactcatttcccagttctcatttcacttgacttgttagcagttgacctctcctttcttctgggaagtttcttcgtttctccgaaacactcactgcacaagccttcatatctcctagtctccatcttgtctctttgacctctgatgtaaggactgagtccttggaccacttctcttttctatttatacttactccctgcgtcatcacccccagtcttgtggcttcaaatgctatctgtgtgtggatagctcctccagtccacacctcttttctgaatcttttttcaaattcacacatgtgaatttgaattccaggctcatcacatccaggtgtgttccccacacctccacctgaatgtctattagaaatctcacacccctcttgtccaaaactgagctcttgatctttaaccagaaactttatctcagctattggcaactccaggtttctgttttgctcaggccacagacttcagagtcattctcacactgccttttctctcatacaccattatgtacctgtcagcaggtcccaaatatctagaatttgattgcttcacatccctatagcaactctcctggttcaagcccatcatcatctggatttttgggaagtggtcttaactggtgtgctgcccttcccctctgctctcaaccctattttcaacatagcagtcagaataatctaaaatataaaccagatcatatcactcctctgctcaacaccccctcccaataccttcatgtcatcctcagagttattgtccaagcctctaactgtggtctacaagtctttacatgatctgtcctgttacattttccactctcgctccagacctgacctaagaggcttttctctgaacttgctaaacatgctcttacctgagggtccattcccactgcctctgcctggaatgctcttccccagacatgcatctgcgtggatcatttccatgcctcctcaggtctttgccctcatgaagccttccctgacaaccctatttaagattgtaatcccctcccacagtggcccctatctgctagagactgaatgtttttgtccccccaaaattcctatgttgaagccttaatctcaacataggaggtttggcctttgtgagttagttttagatgaggtcatgtgggtaatagaattagtgcatttataagggcgtgaagagccctcactgtgaggaaaccagaatgtaagccttcaccagaacttcttcatgctggcaccctggtcttagacttcccagccactagatctgtgagaaagaaatgtttgttgtttaagccaccctgtctatggtactcttgttacagcaacctgaactaagacactatccctctcccctgctttctttttctgttatcaccataattaatgttttacttatatatgatttgttaatgtatgtctcttcccactagaaaccgaattctatgacagcaagggtttttgttttcattattgtcatattacctgtgcctggcatgtgataagccctaagtacttgttgactgaattaacatatgagatctgtgagtctgaaaaaagaagtacatcattccttcacatgtcattttgagccactgttaacagattacataactgttattggaagtgcctcactactccatttggaaagtattcctggaatacacgatgaatgactcagtagaagttctggctatgggggagtgccatcaataaataaaaataataccattgtctgttggttataagttgctgtcacagactatgaaggtatttgaattgtattttcaggaagagaaacagatatgcaaccaatctgatttggttccacaccctgccacagaagtcccaaaggagaagcaaatgccacttgtagactcaaactctggacttcattctcagcaccatctcttaacctactgagtaaatcctatgaacctgactagggtggcaactgaagttgtagtactttctgtcttcaaaggagggtgaacctggagtatgttggaagaagtgttaggttcattagagacacctctttcataactgctgtcacctagaatgtctattctctaagcaccttcttgaaagaagcacattcccccaggaggaggaaatggtttgttttctttagtgacagttggcccaggatcctaaggtaaaggagtatgggcactagacaaaatgagttttataatagtcgattggaaggaatggaagtttttgaatcacaggcttctgccttgaaagggcaagtccgtggtggtcatgaaccacccagagtgtgtacaaggctcctgccagaagaaatgcctgtaggattaaaagcaaaacagcagaatcaaaaaggaagggcacgatgatgcccaggtgcagcctatattattaacagacaaggaaagaatccaaataaaagttctgtaaaccagctgttgtcctgttttctgtttcccttcaaagcaaaaatatagatttgcatatatttgcagtctccccttccttgcctctcagtcttccctgaaaatctattccagttaggtctgcatccttgtcatgctgaaatgactcttaggaaggtcaccaaggacctctgtcttaacaaattcaatagccattcctgcctttactcatttacattccttactcatcttctcagcaatgttggacataattgacaacttctgccttcctgaaacaataattctctgagcttcaacatatggcattatactcttcagattttactctctctcactggccagtccctctcaatttccctggctagcttctcttctaaatgttataggatctcaggctcaagaatgttccctatcttcattctctctaggtaatctcattcagtcccgaggcttaaatatatacgtaccaataacttgcacacttttttttttagatggagtttcgctcttgttgcccaggctggagtgcaatggtgcgatctcagctcactgaaacctccgcctcccaggtgcaagcgattctcttgtctcagcctcccaagtagcttggattacaggcatgcaccaccatgcccagctaatttttttgtatttattagagatggggtttcaccatgttaggctggtcgcaaacgcctgacctcaagtgatccacccgtctcggcctcccaaagtgctgtgattataggcgtgcaccaccacgcccagccaacttgcacacatttatcttattttccatcattgcccctgagcttcagactgaaatacccactgcatttttaacacaaccatctacctagttcaggtcacaaactagaagtcaccttgctagctctctttccctcagcccttacatgcagtctgtcagcaagtcctgctggatctatctccaaagtggatactgaacattaccatagctccctatctgttgctaccatcttagttcaatccaccattatctattagtcttcctactgtcctttcttcccatagtagccagtgttctttctgaaacagtaggtcacaccactactgtttaaaactctccagtggctccttgttgcactaacaataaaatccaaataccttaaaaaggctggcgagatcctgtgagatgtggtccctgctatctctccagttccaccccctgccactcttgtccttgctaactcagtacaagagacattagtacagatagctcttttaccacctcagcttgccaagctttttcccactggggcttttgcaacacttattctttcttccgggaatatccttcgcacccaccttgaaaggctgctcctgctctttttattcgattctgagcatgtcactcctcagaaaaggccatctctgacttctctccattgttatccaattaccatgtcttattttcttcttagcacccattgctgtcaaaatacattagatgtgtttgtccacacatcatctttcaccactgaaatataaattcattagagcaggaattctattttcttctacattgtaccccctagtacctagagaagtatctggcatacagtaaagttcaataaatatttgttaaattaatgtatattgatgctgatgtgattttacaaggtcaattttaactgatacctaacttcaacaaaaagaaccctctgccacttgactgaacctgtacctttggacgagtttcttatccactgagctgtaatttactcatatgtaaaatggtactttttacctcatagggcaggtgttgagaattaaatgaagtgcatgacaacacagtaaacacttgaaaactgaagctaagtgggttttttttttttttttacttaatgtaaacattaccattacaaagtgccaagttttttgaatctggaaaagttcttttgggcttttctacagatagaagaatgttttagtcaaggctcatgggtagggccaggcaaggtggctcatgcctgtaatcccagcactttgggagcccaaggcagaaggatcaccttaggtcaggagtttgagaccagcctggccaacgtatagtgaaaccccatctctactaaaaatacaaaaattagctggttgtggtggcgcatgcctgtagtaccagctacttgggaagctgaggagaatcgcttgaacccgggaggcggaggttgcagtgagccaagatcatgccgctgcactccagcctggacgacagagcgagattctgtttctcaaaaacaaaaacaaaaagcaaaaacaaaacctcatgggtaacatattttcatctaaattacctgcctttttatttttcaataaagttttttcctctccctcgtcattgttcacgaagaaacagtgttctatgatttcattaaagtcactataacatgaacttcaagataggaggatgaagttgtgatgctgatgctcagggggcatcttggctcacttgaagccaagatttttctgcacacaaagttcagatctgtgccacaggaaaaggactgctcacgacactgtcacagccattcctgaggtcacaaatagagacagcctcttgtacttcctcaaaaggactgtttgacagggattcttcaagtagcaaaataagcagacatctctttctgaaactgattcttaatgagctatgaaaaatacatttacatttatcagcactgctcatatgttgtctgcacagcacttattacaggaaaaaaggaaggaatcaccgatattagtatcatttctgtttccatatctacttcgccttcctgctcaccattgccaccacccccagcaccttcccagtataactgctacattgtgtccttatatttttggttgaataaacaaaaggacactgaaggctgcctttgtagcttcccctataccaagtgaacatttattaaataagctcagctacagagcattttcagaaatctcagtgcagcttcataatcattaagcagaatatttatctaaaaacctctaacacttaataccagttactcagtatcttaaccaacatgaaaatacaaaacaaccttttattttcaagtagtcccctcagttctcttttatgattaagggaacatttgaatcttttctaaagtttttccttttgatccaaatcacttcccctctacttttctaatggctttataacccttcaacagtaggtggtgccacaaatgcacaaaagtaaatttctgtagaccaacagaactgtcacagctttattttgtgactcattatattacaacatagaaatatgcattttaatacttcatataaagttattgacatacaaaattttttttcttttttccttttaatgaaaatgatttaacttagaaatctgttgtgaaacttttgtctagttttgcaattctcagatattccagtgcaaaaatagatcccattacagacagcgtaaagtgcttggaatgagggccaatgatgaacaaagagcacaaaaacagcttcatcttagggtataagaagggataatagcatacctaaatccttatggaaatagaaacattctaagggggatgcaacaattttgaaaagaattagagcaatatttctacagtattacattattactagtagataataacaagggtacaaattaatgtctcaatatcaaagtggttcagtattacatgacacatggctctttggaaaatattttacctgatatatacaaccacaagaagaaaacacagacaaatggctttagtcaatgattactatacagtgaatgaatgatgtgcaacatttaatagtcacaaagcatttgctttcagtacagataatgaaatacagtagtgtgaggtttggttgttttttaacaatgaattgtgctgggcatttatgtatagagggcttattattttcttctgtatttctcatattcacagttgttaataagttttctgaggtgtcccaaagatgcaaaagcagaaatttttgaacacgtattttgagaatttctgaaactcacataggtacattccacagggaatatacagaaattttgcttgattgagtatagagttggtaaaaatttctaccacaattaggtttacacaggaaaatgtaaaaaattactattttaaaaggtaacacagtattaatgaagatgtataactatagattgtttctagcttcagaagaggtcctttcaatctgtattaaaatgttgtgttttcttcaaaatagttcacagtgccttttgattttttaaaatatggccttgaaatcagaggaaccgaagtaaggagttgctcatagatttactataatgaagaattagaatacgattttagtaaaatgaggaaaccataactttgattttgaaaaatattaaatgaggagaaattattctataaattctgtatttttgaagatactgtaaaatgcaacgatgccatatcactagttattggaaatatgccttcattacttatatttaaaatcaatattgactttaacttctaaaacaatcatttttttctttttcagcagtgggttatataatattctgtaaatttaaaaaatatagaaagattaatttgaaatctgaagtcttacacctttagcgttaatattcaaattctggaaaaagtggaagaagttagtaatgatattgaaagatcacttgaacttccccaaacaatagttctctcatatttttcttttctctcaagacagttaacagtaagtattagtgaaacagtatttttacaaatgtttactgactagaaaaataagactgggttagaaaactctgaaaaatgctccatatggaagtatttgttgtttttatatttttcttgactagtgattgaagagatgaaaaatttgagactgtcagatttaatggggtatccaatatctgcaaagccaattatttgaaggtactaaatgccataaacacaagttgtgtttttcagcaagttttcaagctagctgttttccctgttgaagaattcattgtttagacttgtgacccttatactttcttggcttttgcattgttgcaattaaaaaaaaaaaaaaaaaggctgcccagtattgttacagtgggctcctacaaccacaagacaacctatatttgtaaaccagtgagctgaataacatggcacaggaagtgtactgagacttaatatctctctagtcttatacgtacgtacatactctttcagctacagcatacactcaaaaaatatttgattgatgaagtgagattaagagtatcctaaatgatctgaaagaaactcaaatataatgtcatgagatcctgaccatcacattgctttctaggcactagtcatgactgatatgcaaacttacataagaaaataaaaatagtggggcagtggccatactcctctataccacagggttctacaaagaggccattctaaggattcagaagtcactgatagaacttaaaattccaaataacattaaaaagtacaaacatttttgtcaaaatacaactccatcttttcattttctagattaattcaaaaagccagaaataatacacttgtgtcagataaacatcttgagatgcagtgtaccatgttagcagacagtcaggacaaatgggcacaggcttccctaggtttgaacgcacaatctctttaatcccatgccctggcttcagcagcttgcagccccagcagtttggctgttgattctttgcctcttaccaggatctaagtatatttaagagtctcataaggatgaccctgtagacccatggctcgaagcataggacaatataacaatggaaccaagtttcccgtgcctggagacacccacatttttgttgcatgttactgccaccagaacagcttatcagagggaatcaaagcaggatgttagccacgcatggcaccattctgtcaactgatattcaatgttgatagactctgagcagagcagctttcacaaaagtgagcatgacacaccatggtgcttcaaactttctgaaaaacttggcactaataactctggcacactcattgccagcaatggatgtgtcaccgggaaaccagtctcctgggcatggcatggcttagtgaatgaggatgtgcattaccttttgattttgatcaataatcgctggccatgattacttgatgaattattgttgcaaccccaatgagaatacacaggaacaaaaaaaaaaaaaaaagtgtgagttcaaacccatatgtccattgggttccataatagagtttcacataggtataggtaaaaaactaaattcaagtctttcacttgagagccatacaagacataggctacaaaggcactgcccctgtaatggaattttgttttcattgcattgaattgcattgcattgaatagtatcagtacagtatccagtttacttcttcccacatcaacttctggctcttttctccacaacacttcacatggtgcaaaggaaagtctagttcctctttactttcagccaccccgtatgaacaggattcttcatacatagctttctttcactttctcatcctgtagaaaagatgtgagaactgcaacgtccactactgtctggtttttgtgtaatgagaggtcttttaagtggtcatcatcactttggtccttggcaaagttcacaaatacctgttaaaagattaagatggacctttataaataccactcaacttgctcattctttattctagttctatttttccagatgttgaaattaggtcaagtaggagcatacagaattacataaatggattaactagaaaactgtgtgtgaaggagggaagaatacttgaaaaaagcaataacaacttaaaaatagactttttttccccccttgaaatggggtcttgctctgtccccaggctggagtgcagtggcgagaccttggctcactgtaacctccacctcctgggttcgagcaattctcctgcctcagcctcgcaagtagctgggactacaagtgcgcaccaccatgcccagctaatttttgtatttttagtagagacggggtttcaccctgttggccaggattatctggatctcctgacctcatgatctgcctgctcctcagcctcccaaagtgctgggattacaggcatgagccaccacgcccggccaaaaactgactttctatatcgccccccacccctacatcaccaactgctcagtcatccatttactttggcacatacggtcttgattaaagggaagagggaagaaaatatttactgagtacttcttaagtgtcaggacctatttggtacttttttatctaatttaaataggattaggcaccaagtaaaatgcctggcccatggtaggtgctcactaaatggtagtttttatggttattattacagtaaattctcacaataatcctatagagtacataggcatcatctcccttttcaggttcagagaggtttagtaaaaagcatagctaggaatagtagatcaggaattcaagcaccaattcaagatacaaactgctcttggacctatgggcgggagtgtcggggcaggaatccacaccctgagaagtaaatctgttttgacactcaaagcttacttggtcaagtgttgtctgagaaacagagtagtcttctatgtggagtcgctttttgctctgggagaggatgctgaatatcctggccagagaagataatgaagatggaagctggtattgtagcatgttccggtgtttctcttttagaacacttccaggaaatgcaagtccaaagaaatcctggacaggcttcaggtccgggttggaccctgctattcgtacaactattgtataaccatctccaaacctgaaagcaggaaaaaatacccaaatggaggatctccagaaaactatttaaaagaatactgaaccctgggaacccaacttgtgccatgaaaaagggcggcccctggcaggcccagaaataagtttctgagagaaggaaccagttatcatttactaaatacttattttatgtgaagcaccatgccatgtgctgtaaatacatgatctcctttaatcctcacctggacccatgaagtctgacagatgttacagagaaactgaggcccagggagttagtcacttgcccatggctcagagctcataattggtagggccaggatgcaaacccatttgtgtttgactccaaagcttgcgctctcaccagtactggcacatgtaaatttttttcatttcatctatagcacaaagctaggaggtagatcttccagggaaactaactcttacagtagttaagtcacttgcccaagagtcacagaaccagtaaatggtaaagacagaatttgaatgcagttcggacttcaaagccctcattctttccactatactgttttgctcagttttatttccctttatgttagaggcaccatttatatactcacaaaagaataaatatcaagccttctcactaggcactatcccaaagaaattatctttattacctattttttagatgctggacactgccaaggcacctgaaccttccattgaccatgattgccatcctagtgcaaagagcttcacattcttccatactgcggtaaaacagaaagaggttttagttttagagagattctctgtaaccatgagaacatcaccatgacttccagcattccagcttcctagggaattgtattctgttacaagtacatgtggatatagggatgatgctgttcagtgtagtggtgtttacaattgtgaacaagttggaaataatccaaatgtctacaaaagggggaatagttaaataagagtatatcctaatggaatactatccagctataagaaatgacacctaaatgcactgacttggaataatgtttacaatatattaagtgaaaaagagcagtatttatactgggcttgcatttttgtaagaatatgcatatataatttcaggtaataattgttttactctttgcttttctgtattttctaatttttacaaaatgatcgcatattctacttggaaagttaaaacatcccacagtgaggaacccaagactttactacggacctatgagatgtaagcactactgatctcccctccttgacaacacttagggcacaattccacaagaaccgccgggctttgggatccatgcctgtggtgggttcatcctgtaattagaataaaataagtcttatttgctggggggaaaaaaaatcaaagataaatttgtttttaaatgcagaagcatctttgaaacagcttaaattttaacttgccattctagttatttcttgatgaatcaaagaattagagtaactttcaaattcatttgtaaacaaggtcattattataaatgtcttattgatgcaggaaactcaaatattctgagtacttttttatgtaattaaatttctccaaataaatagggaaggaaaaaggccatttagttgtaattatcttttcatgactgataagtatatacaaaacaactttttgtctgaaacctctattgaagtcagtataagattggggtgaaattcctttttttttttaattccagctcactcagattaccctagtatattgcaactgttagccttacagaaacaaattccagaccgaggtggaatacataaaagcctcaaaggcttcttcccgtaataacatcaatgctcttatctacagaagaaaaaaggtcaagggccacttcccagtctgatctgtttttcatctatccgtgtgtaaggaactatgacctagttgctaccttggggattttaaagctgtgtccacactcttcattttcagggaatgaacacaaagatgattagaaagaatgttccagagaaagatcaaatcacatatccagcctcaatcacgctaagaaacaaagtgcttggagtgcctctatttgggagcatctgcaggcatggtacagccaccccagtgtgtgccaagggagaagcttccctctgcttttccaaggttgctctgctgtccctgggggaagacaagccaatcatacaacagccctggacatataggacttttgaacagtcatgttttccactcaggccagaacaacagttttccatccacagttatactcaccagaaacaccacaggaggcccgccgatcaaagccatggctgtagagagcttgcgtttgttgcctccactatagttaccagcatatttttctccatacttcacgaggcccagtttccgaatcgcccactcaccaacctacagtgataaaaagcaccttgactttggtctggcttgggaattttatcatgctgtcctacacatacatgtatgaaagttctttcactgagtaggactagattctataatcataacctgacaactggtgaggagccaaagcagggagaagggactcgtgtggtgggagcagcactccctctctgcccacccagccctgccccaccaccgttacaggtttccaccctgaaagcagatacaaagaaccagcattttgtgctgctgcattcatgaggaaaaacagcctgaagtcaatgcgtgtggaaaagccataaggtatatattgtcaggatgccaaaggagacaggctggctttcaggtgcccacagtaccttgccaacttctttctctgggactcctctcaaaagggcaaagaactccacgtgttctctcccagtcaacagctctgtgatggcatcaaactgagggcagtagcccatgttctgatgtacttcatggatgtttgataagatactgcaaaggacaagaaaactacttagattttaagcaggtagagatactctggttagacaatctggcctaatgttcctgtaaagtatgcttctccattacaaagataccaatacatctgctgctacttgaaagcacagcctttctgcccccaggatgctagctcttcctggcaggcagggttcctgcctctaccctccccagtccttgcacctccctggctctctgaacacttcagtctgcaggtgcagtcccatttcagaatttctgaggtcatgccaaccactgcacattctttaccaacaatctcagtcacactaccccagggctttaacgctaaggccccatcctagacttcactcatatgcaccattcacatgcaccaaatgagaaggcccagaaattttgagtgtgagcaacacagaacctagagacacaatttatgtggtggtggggtggctttggggttctatgaagccagtcaagtgaagaatcacatgtgagagaagttcagtgttcacgttccagactgatgactgcacctcagccacagcggcattgccatgaacttggccttctggcagcattcattcctctctgtgtatctaattagcacccccagggtcagcctttttcagaattaggattgaggcacacgtggacaccgtgccaggccctcacagctataccaaccaaatcagttcttacaaccagtccctgtgacaaaccttactatgggctggttattactgccactgctatatgcgtcaggagcttggtactaggagcaagcctaggaaagcagttgtgcagcgctaggcctgctattcccagaatgtctgttctcttaggattcctttacattgctactgcaaaaatgtaagagacaggagaggagatcatgaatacattaatttccttgctcttttcaattttattggctatccccctgtccagtgtgttcaaattgtgagtcattgttcattagtggtttgggaaataaatttagtgggtcatgaccagcacttttttaatgacgcagtataaggtagaataagaaatagcagagtgcactacaattagtaacagtaggtactgctttatgaaactttaggttatacatgtgtctacatgtctgtgtgtacatactaggttgagatataaaatgtatttcccacaacggtcatggtcaaaaaactctgaaagccactgccttgtactatctctccacataataagtccagagaagccgggcgcagtggctcatgcctgtaatcccagaactttgggaggctgaggcaggtggatcacctgaggtcaggagctcgagaccagtctggccaacatggtgaaaccccatctctactgaaaatacaaaaaaattaggcaggcattgtggcgggcacctgtaatctcagctactcaggaggctgaggcaggagaatcgcttgaacctgggaggcggaggttgcagtgagccaaggtcgcgccattgctctccagcctgggcagtaagagtgaaactccgtctcaaaaaaaaaaaagcccagagaagccccacatatttaaagtacttagagtaacattatctaagaagcctataaaatgtagctgtattcccaaagatcagattgctttgtgacctgtgcagtctcagaaaatggcctaacggtggctcagtcaatttgtatgctctttagagagggcaatttactttgtaggaattgttcctgaggaaataataaaagatgtatacagggacatatttacatagtgaaaaatggaaactaatgtgtccaacatttataaggaatttattaaataaattataggtacatgtacatagggggattttatgtagcaatgtaaaattccacatcttaggaaatgtaacccactgggaaatattcataatacactcattaacaataaaaactaattttaaattctacatacagtatgatctcaattgtatggcacatttatatgtgtatataagacagatgtggggtgatggaaaagttctaaaactggattgtggtgatggttgcaaaactctcaatttaccaaaaatcactaaattatactcttaaaaaacaagcaaattatattgtatgtaaattatacctgaataaagctgttaaaagaagagaatgagactgaaaggaaatgtaaattgtgattatctctagatattgaaatcatggatgattttatgtgcttctttaccctttactatatttcaacatttttatgaactctaaaaataccactgtaatcaaaaataacaacctatttctttaaataaattaaaaacaaagtctttgcagcaaaatacaagccacttcttttctcacctatttttgttaaggaaagcatctcctctggtaacagtggtatctcctgttaacatcttgaaagttgatgattttccagccccattaactcccaggagcccaaagcactgaaaaggaaagattaagttgtataagcaaactctaaaaacatgaatataaatgcccctaacacgtaactacctcaaaccttcaattcttaaatatcagagaagaatcaaatattttcttggttttaacacatcgtatagatatttaaatatgtatttcataatgggaccattttaagtgtggctgtatttataaatattatttgagttgtcaagttgaggccaaagttaatgtgtgaaaaacagtaatgaaagccagctagccaaattgcaccacctactctggcaaaagggcataaaagaacacaaacggaaaccagaaaggagaaaatctatttttaaaaaactatttgaatgtcatcaccatcccaaatggatcacaaaagcatgttttagatgtgcgtgctttttctgtttttgttgttgacatgagtctcactctgtcaccaggctggagtgcagcagcgcaatctgggcaacctccccctcctaggttcaagcaattctcctgcctcagcctcccgagtagctgggactacaggaatgcactactatgcccagctaatttttgtatttatagtagagatggggtttcaccatgttggccaggatggtctcaatctcctgacctcgtgatccgcccacctcggcctcccaaagtgctgggattacaggagtgaatcactgcgcccagccccatgctttttcttaaattgtattggattctctgaaatcattctcttgacatacagggtccctctcttctcgatgactaattgctccatcctggcataaatacagaagcctttaaaatccacttttacctcttaacgagcatcgttgcttgattgggtagagatagtctgaactaatagggacaaacgcaatatagacaaagtgtctttacctcaccaggaggaatgcccacgcaaatcctgtcaacagcaggcttccgcttccttctatatatctgcaacaaacaaaatgtaaacattcataagcctcagtgactcacagctctcccaagcaactgtggaaggcaggactataaaccacatacactgcaacataagacttgtcaataaccctaagccataggcatatttgatgtgccaagagccttggtctgcgtttgtggcgactggcttctgaatgattctgaagctcaaaataaaagtgaacttactttttaacctgtctttttagaaccgtatcattcattattatctacataatttttcatctattcaacatatatatgtattgcaggtattttaaaaattaaattccacagagtagaaatttgtaataaaaatattgcaaatactgtacagattccaaaaaagtaaaatttggagatgctggcatctagagggctgatatagaccctcttgaacacaggcaatatatcagctttttggactatgaaactcaaactcaaaatcaaccatttattctctctacctcagttttgactagatatacaatattagtatgttttaataactaacacataaatgtaagcatataaaaccaatgtattcgagaatgggaattcatatcacaaaagaattctcagtaagaattctttaagaagtctccatggtgtttttaaaataaaattgacagaaccttggtatagatgtacattttgggaacacatgcccttttattaagcaagtcagcaaactgctgggttacagcacataaagctgaaaaaaactgaagatgagctattgtaacctgtactctctcaccttcgtcaactccttgatttctaagatgtcattctggcctccaccatcaagaattctctgtctttcccgcctcacatcttcatcttcatcattcagaggagatagctttgcatttacaggtcttgggggaaaaaacaagaaaaatgaacctttcaaactatttttcaggacaaagattcagtctctaacgtagtattataaaacctacttgccacagtctccaggatgggcagggagggggctgcgggatgcccacatcaggaaaatcagttttatcacatattttgagttcagttcaatgcaacccccattggtgagtgtttccctgtgcgcctcctctgtgaccctcaaccaggtgctccacgggttctaagaaaaagctcacctgggcctgatgaagaatctgtactggatcagaacagtaatgaggaagaacaccaccccttccacggccatggcgaagaggtttcgtcccaccaagtcccaagataatggtgacacaaagcgattctcccctagtagacacaatgcagagatccggtcagaatggagggatcaaaaaccatggcccttcctcaaatttgggcctatgttccttaaaattcaccgatcttccaataaacacaaatggctatcacccatgacaaggaaaaaagagtaacaagagagtgatcactttccaagtctgatttgggaaaactttttatgacccagtatcaatcagaatttcagagccaatgtgtattcgatttgtaacttcactgaagatatctagtatttctttttttaatgagacatgccaaaaatccttttaaaaaggcaaacgacccaagtaattttcacagtcagtatttttaataaattctaagttttagtaataataaatatcagaaagcactttaagcagattcccctttcagtagcatatatcctagtgaatcaattaaaccactagattcaattaaatctagttccatgtaaccattccttaaattccttacatatctcctttgtagcccaagttgcaaaaagcccctcttctatgaacagtaaataacatggcccatttgactatattatctaatggatgaataataatcatatggctaccggagaaatatttttaaccattctaaaggtagaaaaagatgtaatacattataattttatagactgtgtaaaagataataaatgacctcatctgcaggcacatgattcgcctaaaagagccaaagtttgcatctttccttctgattccctgatcacctaattctcaaagttatggtttgacttttccagtgcttctaaccaacccagacagtggcatgagccagtggatccaagcaaatgccactattttccttaccttcaaaactgccctttcacttttctcaatgctatcagagacacagacaaatggttgtgtcacaaaacccatgccacaaccagctgtgttggcatgagccctgtcactgggcatgggggtgggggaacatcctgtgcttagtcacctgcttctttccaaaacaaagttcagggtaccaaggcctatgcagagtgccatctccattaaagcatcctacagccactgcttcactcaccaaacctttccagggcatcagccattgcctggtttttcaccatgtcgatgagccctcgtcccaggcaaaaatgtgggaagatcaagaacacggacttcaggatatcattgatattattcagcttctaaaaaaaaaaaaaaaaaatgggagggaagggagggtgagggagaagaaacgggtgtcattcatggtttatcctaaaaatgtatcaagttctgaaatatgggagtgaagaaaaaatttgattctctagggacaaaccagaccttttaattcagataccaattaaatagcagcaggcatagctgatgatatgtagcaataaaattctattctttagaaaatctggagaaatgctctgagtatggagaaataatgaataaagcttagaaacaggctagatttaattaaagcaaatccattaaaaatcccttagcatttgaaaagcaaattgctcatgtctgggtcaatatttgagtttcaggattttgtcagaattttagaaattcttctcaaatacatcagaacttatgatcccacaaggcaacagtggccaaatatctaccaactgaataaggggctatacgctggatgcactgtgctagggcatgggagaggcaaaattattaagaaacagactccactccgagtaggaaaagtatgtaaacaggaaattaccatgtaagtggatgtacgttgtactggaggcatggactaaggactctgagagcacagagaaaagagagaacacctcccagcaggtaaggaaagcttcacattttagctaaatcttgaagggcaagggatatactaccagaccctgtgacagaagaagggcatttcaagccaggcctacaggagcatggtggttggaggcaactcatctgaagcttacagctgggaaagggtgtggtgggtatggacaggaagagttgtgcaactgtaaaaggccttgtgtgctgtgtttggacaaaggcaatgacaaccggaatggagaggaagccttattttagaggtccatacctggaagaactgacaacataaccagttgaatgtgggaaatctgcaacagcaaagcaagcatctaggataactctaagagccagcttgggcaaccgagtggatggtagtgccactgagtgtgacagggatggcaagaaaagcattaagttccaaggggaaagaaaactaggacatatccaggttggggtatctatatactatctaaatggagcaatccactaggcaagtgagaatttgagattagagttcaaggttatgatcaaggctaaaggcattgatcttagagatgacaataaaaacaccaagagaggtgatggtaaaagccttaggactgaatggcgtcgcccagctctcatgtgtaaagtggaaggcagaggagctactcttggtaagagcaacattgaaaaaagaaagaagtaaaaaaaactgtcaaaagaaactgaaaggcttgaccagcaaaatgtaaggcacagcaagaaagaaaggtgctttgccttctcagggaagacagactctgaagacaggacaaggcagtcagcagtgtcaataccactgacaagtggaataagatcacaattaaacactgtcctctggctcccagagatgctcatcccagcaggagtgttctctctgcatgactcacattgtcggtgaacagctccagcacaaaggtggccacgctgccattaatgccaatgaagaggttcacgctggtgagcaccacataggctgtgctggggatcttgaacacaaaggaggctgggtacatgagaggtgtgattgaccacctgttgagacacaaaaagataagtgtctactgagagtccctgccctccttctgacactgggcaccaaatgccttatccactgtgcagctccctcactcagaggtgacttacccatacagcaaaagtagaagggctagcacaggcagattggtggaggacacataggacttctgctggaagcagatgaagatgataatgaccagtgtggcagggacaacgtaattgcactaaaagtgaaaacaaagacatccagttcacccctaaatcaaatatacaatgcatcacacaagttttcaccattatcagacaagaaagggcagataaacatattggagagtaactctgaattaatgaagccacataaactattaatcaaaatacccgacaatacattttgacaagcattttccccttggctgattttataaactacatgccctttctgtctttccaacagtcaagccaaggtgtcacactcagtaaacttactgaacgatggattcccagtcagagtaattttaatttcacaggcagcaaataagcctctattcttcttcccgaagatgactgtgtctgtttcgtcattaatgctatattatagtctgcccaagttcaatctcacatgtaatctatttatgaggtaactgctcataacatgaatgtcagaattgtttcatcgcactgagaataattttaaagtctgtcctgacagtgtatcaagcagtaaaatgcagaaataaagacttgacgataggacaattatgagaattcacagctggcagagcaaagcaccagcagggaagtgatagtggggcttgtcagccgctagaagaactgcagcttcagactacagggctctgcctcagtccaatcctacttgatgtgtttatcaacaacttagatgaagacatgcttctagcaaatttcaggagctctaaagcagggagggacagataatacccaggaagacaagagatgggttcagggacttgacctttcatctctgaatcacctatgcctggcataagtcagacacacagcactcagtctgtgtttactgaaaggagtaattactgaatcaagataaaacaaaaataaaacccatgtaatttaatatggataaatataaagtttagtttcaaaaaaatcaaatgaatttgtatagaatgaaggagacccgaatttcacaatcatttgtgtgaaatggaggttttggtttaccactaagttgccagtaagacggtgctccttccaaaatgcaaaatctttgtgctgcagtaatagaagtgtgagctaaagatcaactccctctggacccataaccattcagaccacagcctgaacacaaggttaattcttggctttgcttttgaaaacggacattcacaatatacagcatggccatacaaggacaaccggatcagaagagtgacacagtctaaggggcttggtataaacagcaaagatctcatcatcatctccaccatcattgctcacatttgtacagtgcttcggaggttacaaggtgtattctcatatatcatcttatctgggtaatactcaggttaaatgagagtatgagagttatttttaaatatccagggacttgttcggtgggagaagaattagatttgctctgtgtagcttataattaatagaagttacagggagatatatttcagggagatattgtaaagtagagttgaaatataattagaacttcagaattccttcaaatcccccatattggtccaaatagaagcaatatattgtggctggcacaaaaacatatttgcaatggatggataagctgctgataaaatgtacagagttttcaaatgacagatggctttcctagtaaggcaaagaacattctgactctggaggttaaaacccatcagagaagttagaggcattgacttggagttttgacttgtatctctctgattcttgggaaagttgtcacataggaacttaagtggtagtggtattaattttcatcattgtgtacagaattttccctctggtgtgacatgaactctggtacccaatgctgtgtttggtgtcatgaaagtgatcacctgcctctggctatttctttttcatacatctttagagtagctggaacatttcctgatgatagccagagctctttctttcttatccatatcaatccatggccctgacagacatcagaaagatacagcaggcctgtgtccttaccatatcccagacaaaattagagagccagtagatgacaggcttcactccactgatgaactgcaggtgttttgctttgctgacccgctcctggatcaggaatacgacaaagctggctgggacgaaggacattgcaaagatgacacagatggacacaaggacatccactgatgtggtcatcctggagagaaaaagcgtgtgaaaatctgaggggtctttgatgcagttagggctcaatcagtgaggacatggacacacagacaaacacacacgtacacacacacagagatatctgaggcacagcccaaggaaaaacatctgttcaccagacacattttattcagggttaagatgatcatttttaagtctaaaaatatgacaatgtaaatgccaaactggtattactgaggtcaaaagagtccactgtcacaataaaactaatgaaggaagtcagagtggttaatggcattcactttggtccactgttcatgaccttgtaagagcagtaagttgtaaattttcacacacaaaggactagtggggcttgaaaactaaatgagagcagaaatattactctgtaactactcaaataaattaatatttctggctgtaaatcaacttgaaaataacagtatgcagcctattgatctaacacatacaaaaattctgtcagatttttataagaagaatggtctcataagcccattacatggggtcttggtataaagatcctagtgtcctatattagtatcctgtaggagtaaagcagaaacaggaactgccatgctccacatacaggaaaggtatctaatgtgtgtgaaatatcaactctgtgctgagtgctgggcttggcaatttacatgaactgcctcatttaatatcatacatctataaagtttagagaccagattcaaacccagatctgtatgactccaaaggctgcatactttaaactagctcatcctggctttaaacttcacacacacacacacacacacacacacacacacacacacacagcttaatttaggaattaaagatacaagctaataaaaacatattccaccaaatttaaaacagtggtttttaaacaaatcaaactgattaaacacttataattaaattataatttaattaacaatttttgaactcactttatatgaattcactaaatgttacgatttttacatatcagtgtcattttctcttctgcagttcaagaagcccaaccagccaattcgtaaacttatcacttctgcccagagcctggatcaatccagatttatcataatataacggtctctgcagctgttcccctacaatgagattcacatttttctccccttctccataaccctctcccttgccccactccatctatacagacacagccacacttacagagccacctctgagagctgctgcttggtgagattcaggggatgattgaaagcagtaattccataatggctagggttctctcccttttgcaggttggcccggagaatggcattgttgatgacattcaggaaagagctgattgcatgccagcccttgttattgaaccacacctgaaagaaaacataccaggtacaaggtaatgcccccaaaccgggctcctgcaggcaggtgcatacccaccaaccatgcccataaacctcagaaagaaattctagtcacataccaaggcaaaacactatgatcagagaatatggcgaagtaattacagtgttcaggacatagtgatcactgactatgtgggcaggcgctgtggtgaggaccttatacctttaactcattgaattctcacaacagtttggaaatagctatgattactgtctccatttcacagatgagggaactgaggtttagataggttaagtaacttagtcaaggttacctggtatgtctggtggcaaagcaaattctctgaatcactacactacaccgtactgcctcactggtaaagttaatagtttgctcttttctgttgtgaatgcccctgccaactttaccatgagttgaaagtactccaggaaacataaggattattgttcatcaaaaagctactagaacaaagacagcggtttaccttgacattatttttggtgtccagtcctgtcataaatcttcccaagctgttgagaaatcgatctgcagaactgtcctgtaaacaacagaaacctgcctcagttgtgactgttcacatagataaggggcaacagtcaatctggaacctgtggacaacaggacggccctgtgaagagcaatgccactaccttgttcactgaaattaaatgtgaagccattaaataaacggctcctgagaaccaagtgactagaaatctacagcagtgatgctgccatgatgccacaagtctagaaggaatcacagagaaatcctgggatgcaaagccccaagattttaatgtctggttatcacggtggggtgaggactcctcaaagtgctccaccggcatcatctgaagagccagaaccacgctctgcctgcagatgtgccagatacatgggcccatcactcaaaagcagacttgtggactctaggactatcactgctgtccacaatcctagggtctgttttatcagagccccttaattctcacctaaaaatgggaaacctgagacacagagaaatgaagtgagtacttatcaggtcctacagaccagcttgccagcttaaaaaaaaaaaagattcatttcctatttagtcagtgattgtttcagcaaagtatgtttgaaacccagtttatttaccaactgaccaaatttgtaaacctggttgttctgagagctttttttgagatggagtcttgctctgtcgcccaggctggagtgcagtggtgcaatctgggctcactgcaacctccgcctcccgggttcaagtaattctctcacctcagcctcccgagtagctgggattacaggcgcacgccaccatgcccggctaatttttctatgtttttagcagagacagggtttcactatgttggccaggctggtctcaaactcctgaccttgtgctttgcccgcctcggcatcccaaaatgctgggataacaggtgtaagccaccgcgcccagcctctgagagcttttaaatctctggatttaatttgttttttgagatggagttttgctcttgttgcccaggctggagtgcaacggtgcgatcttggctcactacaacctcttcctacagggttcaagcaattctcctgcctcagcctcccaagtagctgggattacaggtgtgtgccaccaagcccagctaatttttttgtatttttagtagatacggggttttgtcatgtaggccaggctggtctcgaactcctgacctcaagtgatccacccgcttcggcctcccaaagtgctaggattacaggcatgagccacagctcctggcctctggatttgtttttgacctacacttttaaacgtacaactaagtaattcagttttgtctggctcaaatcgctaaatgccaaagacggctctgtatgccaacatattcagaacaatgagctgccaggtgatccgtttaacctgccaactactcctatatcccagcagctacatgcccatttttctgatacatcttacgatagatattttaccttggccagctttaggtgtttcttcatttgtttgatggcatcattaacttcttgactcggaggaagtgcttgagtattactgacacccagggaaaagccgccatacctaaaagaacagcctgacattaaaacccagacagtggggtgcacagtatcatcagcagcagactcagtgcgagtgtgtacaaggttcactgagtcaaattcctgttcaaaggagggctaaattttgcctcagagaagttacacgtcagcttcctctaataaatgttggcaatctcttaactcccatggtttctgcccagcagggaggacctggcctgattacacacacagttagatagctgagacattgaggaaagaatggtgtttcatctcacagatgctcctccaacccagtggctcgtgtgtgaatgtgggtctggaggcaagcagatggggagttgggagagtgggaaccctgcactgtccagagtaggctgcgctggccttatacacaggctccggctcctttctagcatgagggctattataggggcctgcgtctgctctgcccagagatccaggggtcctggcccttggggaaaaggcagagagaaaagacggaaatcagtaacaaggagccttcgggccccctgacgtagccacatcacctatctcattttccatgatggacaaactggcttcaagaactcttctgtccccagtcccacctgttccttcaaaacccagaaggacaaatgggttgaaatacagtgcaaagagatggttttggcgcttcttatttcctctaagacctttttagtcccgtgctaaatgcctagaaattgtccttgagtccttaagaagcctcgggaatctggtttggggggaaagtacaagtaggtattcccctcacaacactacttacttgaaatccctagacacctgcaggagatttctgattctcctcaaggaaatcagtatatcaaatatttcagaggcctctggaggggctgctgggcactgagccatgatgctctaggcagaaactctataaagcaggcctaatctaaatctgtctgtgcccctgtgtgctccacatgttcacagggcttctgtcctcctcacagtgagatggcacccacaagtgtgtgagtgacaaacaatccccaaggctttcttcaatccaagacacctacaacaccatcctccccctgagctaaacgtgccagaaagacagcaacttacctaaactcattcacccagatcttgttctttaagctgcagagacaaagaaacaaaaaatcagttcaaagaaagcactgagcctattcctaatgatgcaaaaggagtaaatatccacctgaggatataaggaacggacagaaataaccctagaatcagctggccttgtagggttgtgctagagaaaagaagcctgtgttcaggcctcttccagccttctctccatcataaataccctattacttatatgagaaccaggccttgggttaaaccaatttacaaaccaccttatagaccaagatgtaaccaaactagaagctttttctttcttttttttttcttttgggagatggtttcgctcttgttgcccaggctggaatgcaatggcatgaactcagctcactgcaacctccgcctcccagattcaagcaattctcctgcctcagcctcccaagtagctgggattacaggcacgcaccaccacgcccagcttattttgtatttttagtagagacagggtttccccatgttggccaggctggtctcaaactcctgacctcaagtgatccacccgccttggcctcctaaagtgctgggattacaggcatgagccaccgtgcctggcctagaagctttttcaattaacaataatatttcaattgtggatgacatatggagaaattatgcttctttcttagaaactcatggtcactatcactccagcatgcccatgccatttaaagtcactgagatactcctaactgaaagaccccaactgaccaagttgatgggaaggaaacgagaacaaacatttgctgagccaagcattcaacactaggctgccatgtcctgggaagctagaaggctctcccaaggctgcagagccaaggcaggctcctaaaccttcccagagctccctccatgagaccacaaattatcatggagtcccccatcagagagtacccaaggcactctatgtacaccatttaatttagtcctcatgacaaacttataagagcaacattaatatcacaatttagataaactaaggctttaaaaggataaccagttacctggtcaagttgctactaagtggcaaaatttgacgttgaatccatttctattttcattctagaccaggctgcctcagccttgaagctgacaactgaatgttcacagtccctctcgtcatcttttctagtttgggataatatcctaaacttccaatagacagaatcaggccataatctggcatttcccccactgtttcagtctgttatttgtaggtctttaattcctctaattagtaataatacggcaggggccaagtttagtaaaaagtcaccttttggctatgatctgcacatacgtcttcaccagataatccgaaatgtttcttcctgtcaggtcctgaaggatatctgcagtgttttgttttctctgtcatcacatgaaaaccaagcatacgggtctttatagacaagaattgaaacagaaaacaaatcaaggacaacagtgaccatgtccacagtgtgaccggaaacctgactacaggtcccagacactgccctcagtcaaccagcactgagacttggttcaccctgccctcggcactggtaattcacttacaccaagccaaggtctttcccaagaatttattctgaacatctaaacaataaacattgaaatgagattctttgtagtcaagagatttttaggaagcaccatcattcactatgcctaataaatcttctgttcactggagttatactgatgactagattagctgttattttattcattttattttttgatatggagttttgctgtgttgctcaggctggagtacagtggcgcaattttggctccctgcgacctccacctcccaggttcaagcaattctcctgcttcagcctcccaagtaactgggattacaggcatgtgccaccatgcctggctaatttttgaatttttagtagagacagggtttcgccacattggccaagctggtttcgaactcctgaccttaggtgatcagtccacctcggcatcccaaaatactgagattacaggtgtgagccaccccgcacctggactagctattattttcaagagtggtaaccaagccttcttttagttcctgtactcatttagaattgcttgtcctcatcctgcaatttggttgctgataaaagcagcagagagctatcataagcactcctcttcctgaaattctcaagaaaaaaaaaatggctcaggactccttcccaaacagagtctctaagaataccagagttgacaagatccacaggagttttctggtccagcctccctaattcagaggtgaagaaacaggcccaggcctgtcaaaggctaccagctcatttgttgcagagccaagattggaagccaggcctgccacagtctgtcctgtgactttactgctgtgggacaggcatgggcacagtgtggtccaaaccttctcccctcaaaactcacatgctttttcttatgacaagaagcgagttaaagactgaaacagggctgggcgtagtggctcacgcctgtaatcccagcactttgggaggccgaggcgggtggatcacctgaggtcaggaattccagaccagcctagccaacacggcgaaaccctatctctactaaaaacacaaaaattagccagacatggtggtgcgtgcctgtaatcccagctactcaggaggctgaggcaggagaatcgcttgaacctgggaggtggaggttgcagtgaggcaagatcatgccacagcactccagcctgggcgacagagcaagactccgcctcagaaaaaaaaacaaaaaacaaaaaagactgaaacagaccctcccaacatgatatctcactcattcctgcttccaagcggaagctaccagcccatcctgcaccccttctgcccaatcaccccctgaaagtgactcacttgtggaggaggcagcccccctgcccctgggggacacacaggcagcatcttcttgattttgtcgctgctacactggcatgcaggtgaagggttctgcattgtccagttcccattctggaagaggtccatgatggtctggggaactggggcagtggtccactcttcctcccctgcctggcagggcgtgtctctgcaaagggaagacagcaagagtaggattaccagagatggcctggcctttctgttgcctcaggagcacaggatcattccgtaacaaccacaaacatgcatctattccctcaccatttggaaaagacaagcatgatctcatttgattgcttgatcccacaacagccttgtacactgtgacatcatttatatcatcattatgtatcattttatacataagtaaaatagaatgcaaagaggccctaaatatttacatactgaactcagttcaatccaatcaaccaaccatttgctcacacaacaaacattcgttgagcatctactacgtgccagatgctgtccagtatattcgagggcctaaggtgaaaatacctgccttcatggaggtgtatgcccatggaggagacgaacaacaaatacactaataagataaccttagatggcccaaaataaagcaaaataaaaagacagtgactggggagaatgaacctactaagagaagacatttcagccaaaacataacaatgatggagaacaagctgggcaaaagcttggcaaaaagaacattctgagcaaaagcgatggcaagtgcaggtacaaaggccctaggaagaaatgcatttctattttttaggaataataggaagacagcatggctggagtaggataagctacgaagaagagtaatgataaaggaggaggagaggagccagatgagagaggcctgggaaagagtctggatcttatgctcgatgtgctgaaaaatgagtagagactggcaagatccaatttatgttctcaaatgagtagagaattgggggatgactggggtgagaatgctcgtcacataaagagctacgctgtctacaaattttccctggagataagacacaaagccttcaacctcatctccagctctgaattactgtgggacatcagcaggtcccctgctcttttgggggcttattttttccactggcaaaataaaagtttaaaatgatttgattcaacaagtcatttccagttcccttccagtttcagaattccacaatttaaagtaaagttacagcaattatttccttattattaaatattaaatataattgccaggcacgatggctcatgcctgtaatcccagaactttgggaggcgaaggcgggtggatcactaagtcaggagttcaagaccatcctgtccaacatggtgaaactccatctctactaaaattagaaaaattagccagtgtggtggcacatgcttgtaatcccagctactcaggaggctgaggtaggagaatcacttgaacctgggaggcagaggtggcagtgagccaagattgagccactgcactccagcctgggcaacagagcgagactccatctcaaaaaaaaataaataaataaaatatatatatatacacacacacacacacacacacacacacacatatatatattataaatatatatttttaactatttcttattgttttcttatgtattaaaaattcaaatgaagttttccagattgatctctaattgtctccttaaagcacctgaactgaccagaaaagtcacactaagacgcgctgccctcctgaagcttacactctgaacattcaaaaggggattggctgagacaaatttaaatacagctgagacatgctcctgtcaaatttccttcaggtccaccatttttttgcaaaacctaaaaatttgaatttcagtaagaattgtaaggataaaggctcttccttccaaccacctccggcagactgtaggtggggctcagacatcatgtttgaaccctctgatgtcagggccgggcctcttttgtctctatgggctggctctcagcccagttctggctcctacagagccttcctaagctagcatcaatccatgagttcatatggttcagctggccagtgatgaatccagataactatattatcatctcatctcatgcttctatcttccctacacaaccttcatgtggaaaatcaaaggcaccatgaaatccagataggccgtgtctgtgtccttctctatccttgtcatctggttatttgggaaccaatattagctgctaggatttaccacccattatgtactaagtactaacaagtatttagtaactatccaatactaattaagaacaaacaagcacacagtagctatccatttagaaatctgctctagaaccttgtataaacaggttatcatgctcactgttctgtggtgtgcagagtcacctatcttcccattgaaacttgaaagtcaagtttgccccctctccaattctccagcaccttcccaccttgccataatttttcagagatcactgttgtttcatgacctcagctgagattctgcctaaacctggaaacactaacccacctctaccagccttgagcacggcctcataagatcctcacctctccaccatcttcactcacagtgatctggtgacctcccttcccctacactcacttaagggtcatatggatgcttcactgaatttatttatccactgcttactttttaaaagggggttttgaaggaaagtacaataaaaatatacaatttgagaagaagaaagtgtccctttttataaaaattcatatgccatcttttcagattataaaagcgaagaagctgataagcaaaacctaaaaatcatatataatgagagcctattgaagcacttaagtacaggggctgggagagaaagaaaggaaaagcatttcatcagtaagtgtaaagtgctatttaaattaaatattaaggttctaaatcagtaaacaaatgtctgtaatgacgtgctttgcacggtgttagaagactctccaaacgtttgttcctagataatttagttcggttactaccttcgctttttgtaaataaaacataataataattcaaagggcaaatgctggcggtcacaatgtggcatgcagttgataaatgcagcatattagaaatcaaaccaggcaacaagcacaagaagcctgcttatggctaaagtggcactcacgggattgggtttccttccatacagcgggtcccgaagccagggtctttggtgagggcgtttaagagttccagggttcccgtgtcctcaggagcatcattgctgtgggtacatgagaggcagccagcttagtaattcattaaaaccagtaatcgagagataaaaatgtttttataaattaaacattttaggaagcatttctctgtgacaggctcttaaaacagaaatgaacaaaacacagaaaccacccagaaggatctcagactctggccctgtattcggcatcagggtgacgtagagcactccaaagtggagcttgttttaaatgggctgtatgtataaaggtgtgtatgtgtacacacatgtacatacacatatacatttatatattttttttaatttgaagaaaatcaactcattaagtatttcaaaagtgctttcacaattatccctttggcacagacaagcaggattttccaagaaagggcaagaaaactttgtactctttgcatgcacaactagaaagcacaaaaataacaggcacaggtcacaaacacatgctatgttccacaactacgggcaatacagggtcagcagccggaaaggaaaaaataaagtaaacctgaactatgtaagaagaaaatgtgggcttagagaaaaagaggccaattcacattacatatatatatatatatatatatatatacttttttttttttaaatgcttcccttttgtatcactgacacagttcccccatctacaggtctacaaatctttcaggactgaagaaagctcctgctaacaagacccagaaaaatcctttgtccttttctttgatttaatgtattgttacagagtgggggatatttttatctaaagaacaaacactacctaacatcccaaatataacagaatagataataattacatgaattatactttgcagaaaacaagtctctggaggttctatgctttgacagtgtgccctgtgactcagttacagaattaaaacacagctccacaaatccaaatattttataacttaatcatggatttttgcaagggtggattatttcacctaaaacacatgtggctgttcctgacaacagtaggatgaagaggagagaggctgaaaggctcaacagaagactggcctattattcagggttagttcgctgctgttctatgcatgcagtattagcttatacagggacctgagccgcagcagtaaaattcattccaccgtgtaattctgaagtccattcccttggccctcgtaaacatctttggtctgctcgaatcttaccccctcctgggatgtagaagacaaacatacctgacaaatgtgtactgttcgttgtacatccagggctgaagttccaggctggggtacttgccaaagggtggcacgatcaggctgaacacaagggcaatgcagacaaacacagctggcaagacaatctttacccaggcagtggagggggcagggggacagcaggaaacggcaagtgttagaaacaaggccaaggggcaaatccctacgagtccagcccacctccccgaccaaccagcacggcaatgaggaatgcagggcctatgactgtgctgcaccaaggcattcttggcagctgggaagcaatggagcctgaaaactaaaccttttctctggcaacacaaggccagaggttatggccacctggcagaggcactaagccaagaagttcacgaagtaaatagtgctcacattcagggtgactcagaacactgggtcctgcccttcctcctcctgaagactgagaaagactacattgggccatgaacccaggaccaggagccagaagtcctgaatcctggttctgtctctagcacaagtgtacccatgtgaagtcacgctccccactggcctcagttttctcattttaatctgaggtctgagaacacatggcccattcaaatcctacactataataaaaccaactctacagcaacggctccaatcatggacaaccatagtcattatctcccatgatagtctcagaaagaataaatatccaattccttcttcaacctcctaagactttctaccatatcttctctgaaaaaaaaatgacttgggtatactttataagttaacccaaaactccttccatttattgctgagaaatgtattccttataaccttaaagattcaaataatgcccccaattctaatgttctgggatttcaatgcagaaaattaacattgagtgaataattctgtataacaactactataatgagaactatctctatgttgtcattatttatggttgtgttatcaatggtcatcatcaacaaacaaaggtaactgaggatcagagagactaagcagcttgcccaaggtcatatagccaataagtagcaaagtcaggattcaacttgagctctgtatgctccaaactcccgctcttaacaatatccacatcatcaaatgaaagactctctgcagaccttttctctatatttcttgattttatagagtgaaaaaatttaacctttctaactaagcaagttagcatgcaaacactgacatgcagacaatagtctaacaagtcttctctgttggccaactatattctgacctatcttttctatcagtttgagttaaacatcaactcagagaaaaatcatgtttctaataaattcacatgtcaagtgcatctgggcataacaactctcatgttatgacagctgaatacacccaaccagtttttctacactttgtcctttttatgttctcctccaaaataaaaataacatatacacacacaaaactaagcacttactaatgtcaggccccattctaagcacctattcatttttattttcgtaacaaccctgtattgcaggtaatattattatccccattttacagatgaggagattgaggcatagagaagtaacttgccagcggatacacaactggcaaggaatagaactgggattgaaatacagataaatctggctccggcatccatatcttgaccaggatgctatcctgccttcactggtcacagagcctgcagcccacccatgaagccagagtctctggcgaaaacagcacgtctcacctgagcaaaaaatcctttccgactccgtctggcaattagcagtctcttccacaaaagggccacaaactgttgctgtgtaagtttccagcctttcacctggtaggaccctttgccatccatcccactgagcaagtctgtctctctggattctgcaagaagccaacactgaaggtcacctattatcttaggtgttttcggcattgccatgctccttcttctggtgtcttcaacaactatcttgaaggcatgtgtctgaagctagaagtttctcagaagtaaagggctttcatgacaaagctatgtccaaggaaaagcttgactcaaaatgtctaacagtagcagtctctgcctttcagtccttgtctgataagtacagaaaagaaaggtgtcttgagacaactgaaaagaggtgttcatgcgtaaccaggtgttacagccagccattcggatgaatcaagtcatcaatttcttatagactactctatgaaacaggccatgtacgtagcttgacatatttgagaatacacaatggcaattagcatctcagcttctcaccctattatattttggtaaaacgtggacacatttcaaatgatctaagtactgatactgtatgaagtcaggcagttatatataatgtaagagccatacactctttgagcaggggtgagagaactggaaagttttctgttcctaaaaattttctagaaatccttgtcctaaactaatgatacctaactgatgtgcttttacatcttaacaatatttgtttgatgtcttagctctcctctccatctcagttaaacacacaaagacacactcatccaaaatatctaattctttttttttcttttttgagatggagttttcactcttgttgcccagtctggagtgcaatggcgcaaccgtggctgactgcaacctctgcctcctgggttcaagcgattctcctgcctcagcctcccaagtagctgggatgacaggcatgtgccaccacactcggctaattttttgtatttagtagagacggggtttcaccttgttggtcagactggtctcaaactcctgacctcaggtgatctacccacctcagcctctcaaagcgctgggattactggcatgagccaccatgcccagcctcaaatatctaagtcttagggtacaattaactctaacagcaaattcccctttctgactctttcaaaatcactcatctactcgaatgaatatttgttcaacaattaaacacctaatgtatacaagaaactaggaccccgcagaaaagataataaatacatgggttcagaggattgaggcaccatctttatgtctttaaaggaagtgatatggataggctctttcaggtttgatcacatgcacgatgctgcaaagaacaagtggcttttaccatttcctcacttctctttggactctgtagggatctatcaccttggctaaaggccatccaaagaaaacaggtgagagcatgagagagaatttcacattcaaacagtaggacactgtttgatcttgccctaacagacctgggtctatgtcagaatcatttggatcagcagcatcatcttcagtgaacgggcgaagacagctctgcttgtccccgaaggcccgcctgtttcgtcttgctggcaaggtaccatctgaaggcacaaggaaagaatcccatactttattttatttacaacaaaacaaaccttccccatctgcaacaaacctacactctacaaatgagaatgcaatagaacaattcaaagggaaaggaacaatactcgtgcactgagaaagccagcagaaggcactatcttaagtgtgccattctccctcaaggcagttacctgaggtctcagcatccaccccactctcttcggccaccttgaggaatatctggaaaatgagagagatgagaacattataagcaccaacattacgagagtagtcaccactgccacgattattatattactgagtggcatgttagccccgtaagacagagaaagtagaagccacatttcttaataacactttctcagagttacctgggagagaagccgtttttgccagagaacatttcctcagtggtgagagctatcaagctagacaatcattttcaaattaaagttatggctgagcgctgtggctcaggcctataatcccagcactttgggaggccgaggcgggcagatcacctgaggtctggagctcgagaccagcctgaccaacatggataaaacccatctctactaaaaatacaaaattagctgggcgtggtagcacatgcttgtaatctcagctacttgggaggctgaggcaggagaatcgcttgaacctgggaggtggaggttgcagtgagccaaaatcgcaccactgcactccagcttgggcaataagagcaaaactccagtctcatcaaaaataaaaaaaaatttaaaaaaagctatgacagacactgcgcagaagaaatttattctgaacctacagggaatgagtcaagtggcttctttcaggactgtggctctaaatctttgagtaggctagtactatgataagttatccaagacagaatgagcaggaggaaatagagcactagaaatatgatggcagcaattcaaacatcagaagagaatctgaatgagcgcaatcatttccaaactctagtctatagaccactgtgtccaaagtatgcaatagaaatacagacttcaaggcctcacctccagaaattctgattcacaggccctgaagccaaaccttagtatgtttatttttaataatatccccaggtgattctgctgcactgtcaagcttggagaccacttggccagacagcttttatatccccttcagccttcaaggtctgtgatgttgtatctctaaggggaggcattacatggataaagagaggatggactttgaagccccaaacccctgattctgaatctcatgtcagcattcctgagtgttcattttttcatctttttttgagaattaaatgaggtcacagtgattaaaaaaaaatcaaaaaacaaaaaacaaatctcagcacctggcacaagtagactatccatccataaacgtttgtcatttcctatgtatgagaatccagttgatacctggctgtgacacagtcacaccagagaattgctcctgattctgattcagtaggtctgagctgggcccaagttgctgaatttctaacaagttcccaagtgatcctgatgccgctgttcctcacactgtacttaagtaaagaggctcattaaagggtaaataagtgcataggagtttaaggttgggatgtaaatgtgttaggtaccactggtttcaacacacaaatctcaggcatgtactgtggtacagaggaaaacacttctttcctgctatctcccactaccatcttaaatggctcactggggccaacattaatcagatgtcgatgacctaaaaactcaatgactaactccatgataatcctgctcccaatgcaggctactggtctggccttaggacatttggccttgctatatattccgacagtcagccacttaacttacttcttccagggtcgtctctgagatgccataactagaaatgcccaggtctgagagccggtcatcaatctcatgaaagagttccacaaaggctccctccttagcagcttcatatggcagcacataggtcagctcatgccctatgtcttccaccagccgggcttcagacacatgcttcctgatgaggttggagatagcagagacatctgcagggaccagaatgcaaagatggctcaatcaactcagaggggcttcggagtgagggctggccatcccccaccctctcatcagaggcctgccgctcatacaccacacctgttccaggtgtttaggtcattccacatgttcatctctggtctgagggttgggggcaaaggaaaggactatgtcttattcacctttgtatcaccaaagccaggcacattataggtactcagtgtagaatgggtggacagctggatgggtggatgggtgaatgggaggatgggaggatggaaggatgggtgggtgggtgggtggatgggtgaatggataactgaggctcaaagtctggtgtctattgcctaagctctgggattcttcaaaagaaaacttgagtaaaggaatcttaaaagattcttcaccctttcctatgcttataaagtaggttccctcatttacctaaataaagggttaatctaacagtccatggaagcagaagccttcctgggaaaagccagccattaggactaggcagagatagcaagggtcaagacttctgttccacatatgctactggtgacactggcctcctacacacgctacccaagaaaaatctggaaggctgttcctcatctcctgggctctcactcttcttatgtactaagctcaaatcccaccctcctggcttggccctcagctcctcatccctggtattcagtgtccactcccctaagggattccccaaaccccaatcatctcagctctctgggacactgccctgctagctcccaaaccgagccccaggcaccccagcaagcattaggccaacccgccaccaagctgctcccacacccgcagccacccagccccagcccagcagcaaaccttgagtcagcgccaccagcctctgcacctctcctcctctgcctccactctgcccagctgggggaagctcaggcaccacctgaataagaaaccccagagtccttaccgatggtcagcgtgtcactctcatggtcgctgcccaggccagcatcagaactgctctgagaaacactgtcctcctgatggcaaagaaggaggtgagaacgggtcagggacggagcaaggcagagccaccagcaccttcgccggggagggcttccaagaagctctgttgtgtgagaactaaaggaaaaagctttccctgggacacatgcactggcagccgtggcttcagaggaccctgtctggcatgtgtgtgccgtgtgaacagcctcgcttcctgagggtgaaaggtcaggaagcagagctgccaaaagaactgtggcctgccaatgaatgctgcaatgaggcctttgccaaccatctcaggcaaggcctttacctggctacatgtctagttcaatgcttctcatgctttaatgtgtgttcaaccactcaagaaccttgttaaaatgcacagattctgattcggtaggtctgagctgggcccaggttgctgaatttctaacaagttcccaagtgatcctgatgctgctggtcctcagactgcacttgagttaagaggctcattaaaaggtaaataagtggataggagtttcaggttgggatgtaaatacattaggtaccactggcttcaacacacaaataaatctcaggcatgtactgcggtacagaggaaaacatacctggtaattgggtctggtcccaccactgttatttacctgctgggtgaccttgaatcagctaccaattccctacaagcctcacttccctcatctgggataataaatatagttaccttcttcccagggtctctctgcactttaattgagatgatagaggttaaaaaaaaaaaaaaggttgtaaatggtaacaacgctatataaaattaactattatcattactttctttcatgcccagagtgtctctggcatgaaatcagtgcctaataaatattggctgttttatagtttaaaagttaaggtcaatgagattgaaaagtaatgagcaggaacaccaggtcatttgtagccaaggctcttacctcttgacaagtctcttttctttgacataataatgtcctctaaggaccttctccatcactctctgtgcctcataggaaaaggaaaacgggattcaacagaactagcacaatgggagcagagggccccttagctttccatgccttaagtatgatatgatttcaaaggggcaacagagcagggagatggtggtttcaacatggcaaaaggggtggagatggagaaatcattcacagccagcaagtcctggctgcccagacccaacaccagcccagcaccaagactgcagctcacctttttcaggtatgacacagtgctactactgtttctgcaggaactgagggaggattccacatctttcttgaccaaggtcaggtagtagcctgttcccagctggttcttcagaaacagggaggagcccacacagcacagcttcccatgggagatgatggcaatcctgtcccccaggacgtccgcttcatccatgtggtgtgtagagagaataatggtgcggcctgccaggcacaaacacaaggatgtgggacaggtgaggcctctcagttctgatttgtcacagtgacagggactagagagatattagcaggggtaagcactggaagagacctggaagccacctttcaccctgtatggctatgacccctagaatggcaaagctttgtatatataggtaccacatcctcacagaggtaagaacagtagcattttatttgggaacttgctatatgccaggcattgtgctaggtggtttgtgtgcattctcatttaatttaatcctctatgaggtaagcaccactattattatcggcaaagaaggtgaggcaagttgtgactttcccaatgtctcagggccagccagagttggctccaagcctgcctgtgctcctcatactgtaccacatcagatctctaaccagagagcccaatcgtcttcctgcccctctccgcttccattcatttaagcatccaccctttcaactaaccataaatttagtgcaccatgttggggacaaaaagatgaataaagacacagcatctcctctcaggaatctcagtctcaatgccctttatctcttctgtgataacagaagagtatcccatggcttcacagaagcctagccatgagatacagccacacttctcaaaagccccccgctctctctcagtccatttactcagaataaatacacatcaggcaccttgtcggtatttcagcagcagctcccatattcccctgcgggagtaagggtccacaccagctgtgggttcatccagaatgacaaccttagatcccccgacaaaggccaaggccacagatagctttctctgcattccacctacaaaaaaacagagcaagacaaactccaggaccagccccagacagtgagtgaaggcagaggacctaggggcacagccagggacaagtttctgttaccaaccgcacccagcctgggaccctggggcagtgctgattttcctccgcatgtgtgtagccggaggaggaggggagagggatagggaaggtagctctgggccgcacctgacagctggcttgttttgcttttcagcttgcttgatggcaaaccaacatccagggccatctgctccatctccgccttcacgtgcttctcagagagccctttcaagcgggcatagaaccagatgtgttcttcgacagtcagcctggggacagggaggcaggtcagctctgggccctactggataccccagaatacagtgtcccctggcccagaacagatgagaatgggcatatttttctctccccgtgctttttaaaataactttatcaatttctgaaaaataatcttcaagattcaaggtagaacaacagtgagcaaccacatgagctgctcaggaaatcaaagtgaaaggtgacagatcgcttccaacctgtttccagcaggcctggccaccatgcaccaggcagttacaactttcaatttcagggccccaagatgtggtctttaatgggctgtccccacagcacgtccaccaagaagtcagctcggcactcacctggagcagccttcctgagcctcaggggacctcaggctctgaaagcggggaggaccctgcacatgagccccatgtgttcactttagatgaggagggagcacatgagccccagctgttcactttagataagaagaaacataagggaaaagccttgcccaagattgcagagctcaggtctctctctgctccatcacacgggctccctgggggccttatggctgatgggacaacctgagtgggagcaaatgtcttaagcagcaaatataggtccatcataccagggccctgaagcactaccaggtctgggaagtctgctccaggcctcaataaggagggtggcgggggagaggatgggctaaagggccctccagcatgacaataatgggaagcaatgtttcccaagcccccatccactggctgggctgatgtcacctctacagctcaaccattcacctcccacttctcctaaaatcaaagaacaactaggtctcaaggtgttcacggaggtgagcctgccatattcaaagaaagtaaaatgtggccagacacagtggctcatgcctgtgttcccagcactttgggagaccgaggtgggcggatcacgaggtcaagacattgagaccatcctggccaacatggtgaaaccccgtctctactaaaaacacaaaaattagctgggcatggtggtgtgtgcctagagtcccagctactcgggaggctgaggcaggagaatcgcttgaacctgggaggccaaggttgcagtgagccgagatcgcgccactacagtccagcctggctacagagcgagactccatctcaaaaaaataaaaaagaaaaaaagaaaaaacaaaaacacagcaaagtaaaatgcttaagtcccactcctcccatgatggcatgacacacacacatccagaaaaggcctattcttaacgtgctgctggtactcacatgtcaaacagcacgttatgctggggacagacccccaggttctgccggatggtgctcatctcagagcgaatgtcttttcccaggatgtaggcggtgcccgaggtcggggggaacaacccggtcaggattgacctgaggacaaaaatttagaagtacagaagtcagggttgacctacccttaactctagatgctccattcagtctgcagagagaacagaacaccaaccctcccaccgcccccattcctttctaatgaaccctaccagacccacacaaagcaaagctgtccttttgcttcggtaaataactacaagtgggcctatgggttagaaatgccaattttagtatgagcattttttaaacgaagtttccaatctgcaatgaaagtattctttaaaaaatgtattttgtatgcctaacatcgcatgcatggaaaatggacaaacaagaacatattattcaaagataaaaacaatttttgtgttaggtagtaggatttctgactgccttttaaaaatcttctgaaaagctcataatatattaattctatgttttaaaaaaagattaaaaagaaaacaggaaaagaatgtcaccccccaaagatataccctttggaatggttagaatggttgaggaatcgtgctggaagccactgaggctaacgctggtgctttacagcccctgacccctcctgatactacccactgtaaggtccttgaggtcgcagggaaggcaatcaagccagctgcccagcttgattgcgtctcacaggtgcttctcacatctgcttagagacagagttcctgggaattaccaactccctccaacatatgtaatctatcttttcgtggctgcaggttccaagaccactgcagaattctgtgaactacatgggaaaggtcatctgaggccccagcttgttttaggctgaagaaataacatctagcaaactagcacgtggaaagacactcatgattagataacatgttcacattcggcaactcctcatgtgctccttcccttggcccagggatcagcatggtttcctaaggtataaatttctaactctactgcagaaccctcctgtggctgattctgcgggaaccacaccctcttcttacatggtggtcgtcttccccgctccattgtggcccaggaaggaggtgatctggccctcataaaaattcagtgccaggccatcgacagccaccttcatcccatctcggtagacttttaccaggttctgaatggacacgcccagcttcaagtgggtgggttcctcctccatgcagactgtgacaggagagaagacagaaatgaacccacagaaagcactgaggagtggagtgtaaggacacagggcactgcgcttgaactttcagaagtgccttctctccatgtccaccctggtttctcaggcaggcaggaggctataaatgtttatttagggcctatttgggtactgatgttggtgatgggaatacgatgataaaggagcattcagagtctattgggaaaaaggacttgatgaacaattaaaatagaggatgctgaaagctgtttaaaaaatacatctaaaaatgccatggaactgtgatacacccctcccagggaacactactcagcagtgaagaggaatgaactgttgacacacacaacttggatagatctaagggaatactgctgagtgaaaaaaaaaaaaagccagtatcaaaaggatacctactgtatggttccatttatgtaacattctagaaataataaaactgtaaaaacgaggaacgcattagtggttgacaggtgtcaggaactgaggaagaagggaggtggctgtggccattaaggggtagcatgaaggagctttgtgacaatgagatatttctgcagcttgactgagctagtaattacatgaattcacacatgataaaattgcatagaactaaatacgcacacacacacacaaatgagcgcacataaagctagtgaaatctgaagaaggtttgtgaattgtacctatgtcaatttcatggttttgatactattctacagttacacatgctgctaccattggggaaactggatgaaaggtttaagggaaccccctcatgtaatttgtattacttcttgtgagtctgtaattgttttaaaataaaaagattttctttcacgtgccatggaagttcagggcagagagtgactgactacctgagaaccaaggagggatgctcaggggaggggatccggaactagatcttggagagaaaggaggagttgagaagataggcaagttagagagaaagttctcctgtgagagcaaacagtacctacaaaggcatggaggtgtggaagaacatgacatattccagcgactgtgagcatttctaggtgactgaaacaggagctaggtgtaaagaggaggtaggagaagatgattaggaacagcaggcaagcgtgctacactaaggggcatcatacttttaccaagggcaatcaggggatgggcacagaagagactggcagaaaagggacctattaaatatttaggaagccactctaagcacaaagaacccagaaggcagagcctttgatgagctgtggacatctctgtctgcagttaagagccaagagaggattagggatctgggtaatgattacattatgaagcataggctgagctctgtggtagccacttggtctcagcccacacaggctgatacacaggtcaccatgtcacaggcaggcagcgaggctatggttccacaatcacgcttgtctttacctctttcttctagcttgttaggagaccatgaaatgtgtgtttgggagggggcaagtaaaagatactcttctagaagccaagacaacaaagaaaatgtccctcagggatcgagaccgtgaactcccaataggtcaacagcattggacataaatggcatgggaggatttggaaagggacactgcatgtgatttctctgcccctggagtggtttcacagtcttttagaaaggcaggagacatcgcttgcccccaacagttagcagaggcagcagcactaggttaaagaaagagcaggaggtcaacagcacttactttctgatattctcttctggttggaaccagggtggctcttctcatcactttcctcgccaaaccagtaggacttggtgcaaggaaaataccagggcctgggaattccgtactggcctgaaagcaaagcacaggtatgagccaagctcagcatcatcccagtattctgagggtttcccagccaggtccatttcctccttgacacatcctttggagaaggaacagatttgaatggatgtggggaaagagggagctaacatttgctgaaacctgctatgtacaacgtacattctgcacctctgtaagtccttccaacaacccacggggcaggtgccatccccattttagagatgaggaaactgagggataaggagcctatccaaggtccctcagccagtaagttaagactcagaatttaaatccagaatctgcatgctgcaaaattgcatattcaatgaaagaagttcaggcaggagtaataaatatttcatgtatacctccttaggggaggatcagaaggtgaaccaaaaagggttaaatcttgctctctcagaatttgatctcatatgaaaactgtccaacgcaggttcctcttggacttggtcaagaagatgtattatattaagaaagaagtactaaagaaaaattcaacatgaatttttattgaatgctaattaaatcacaggcaggccttagagctagtatatttaattattaacaacctgtactcaggaaacagaacctctcctagttgtaccccctctgaggacacagaaatacagaattgggtgagcattgggaggattcgcctgggcttattgacccagtgtaaccgaagtggattcacctccacgtaccaacatttaacagttgtgtgaccaaagctggttacttaacgtctttgagtcacagttctctcatttgaaaattgctggttattatagtaactacttcagagtagccttgtgagaattaaatgaagcaatgtgtataaaacattttgcatgctgcctggcacacagttttcaagaaacaagtgctgtacaagtagtgacaattgtactttcagcatcagctgcctgtccttggactatctgtttactatagatctatagcccaaaccacttcccagggaagcccatgcactgcagagattctagcacaaagaaaggacatcagctagaagtcatattttccaaacagatgcccaaagcagtgtacctggaaagacagcctcaatgtaccaggtcatcaccccatagaggaaggtgtcaaacagcatcatggagaccgaagtggtgagattgaagccatcttcctccacaggactctcaaacaggttgtcccactgcactccaatgccctgctcctcaaaaagggcaaagtactcacagccaaacccaaaagccacaggagacagcaggctctgtgagaaacaggcaaagtcacctatccatttcctggtcagtctcatttttctatctcttctagtgtaaattatacctggagaaatttgaatttgcaaaatggatcaatcataaggtgcagaagtagtatttacctatagagtccctttaggggagtggtgggctaccaagtaacatataaaatgattccatttgtaaccactcattatatacaaacatttcagaaatgcatatacagtgaagcataaaacttttaaaactttatgtttccaaagatgccccaaggctcagcaatcctgttcccccacacacatgcgcatacccacagtcttctgaggctccctgctcagccaaggatggctcaggatcagaggtgcctgtttggggctgctgatgcctatgaagcccagactgaggcaacaggagcatcctatgagtcactcttagctttcctgataagtgacctggggacatctgacaacttgcacttgtaggggctcacacactctccaagatatccccctgctctgtacgagggaaggaagtgtccaagtcaggaatttgtgggatgaggcacctgctcctcagttgtgcttagttcagaaaacattactcaagcaaaacaccatactggacacaaggaagacaagagaggtcatctctgacatcaagagttttcagttctatttgtggccttggctttgtcatgagcttaacatagccaacagagctgggagataaagggcagagatggcatctgttgcctgaagccattcctcaatgccatttatccccagcccagttcaagatgcagtctggctctcggaaaaattccattcaattcaattcaaccaggattcactgagaagactaaaggtaaacaatttaataaaacacaatgcttgcccttacccttaaagagcttagaatctagagctaaggttcatgtcccattggaaaagacaatcatcttctgttctcaacttgctgcttttattcagggactccaaaggaaggtcaaatgcctacagccactgaagaaaggccagaggtactcacagcgaagatcttgagtgtgaagcccacgtagtcctgccatgccacacacaggacgtagggcaggtacagcgtgaagtagatgatgcccccacaggctgctgccaggttggctctggagaagagtgtgctaatcaggaagcactgcaggattgtcaccacagcaaacacggacaggaagacaaacaccacgctgggatcactgtagggcagcaggtttcctaactgggaaggaagagacacatcaaatgtgctgcctcaacaatcccaagcactcacttgtatgatctacagaaaaaagacagggtttattcctactcatgttagagacaatgcagaggcgtaatgctgttcatctttctgatgaggcaactgatcattaccatcctaaagaagataagtgacttacccaaaactacgcagaaaaataatggcagagttatgaatacaacagagtccagggctttctacgcatttcagtgggcgagtttgctctttgtttcttcaataggtaatttcaactggtttctccttatataaggactatgactggtggcaccacagaagagctgtgggagataatatcccacgtaacttttctgtctaaaagccaaggaaaatggccaggcaacttgactttccctcttgatcaccatggattctgcattcccacaatcatccaaactcttgtggatattttgagcctatctccggctgatgggtacatgtctgcaggacccaccagcatgcagttgtctcagagcagctcttatgcaccaaccatgggaccactacctctgccactgaccttccccttgcagttagataacagagcatgagggaggggttgcttttagcaagaactgtatcctactgtggaacctcaataaagtccttgaccttcctgagcctcatttccttgtctgttaaaagggttagtgaggatagaagaagaagcccatgtgatgtgtttaaacagtccttggcaatcagtaggaactatttgtaacagatggtaactagtattaaattagttagttcttatctctttgtactccttttgcttcaaaaacatttatttttacctgatgtgtctttatatgaaatgcttgcagagaaagaaaattcggatataaatatattaatgtatggttcagacacaaaactgcactgcccagagtccccattcagggaagccttgttgcccagctgtcagtagacggcctcaggcatcagcaactctgggtttgtcacagcagcagagagccatgtaggccctggggcacgaccttcccagggcagcccacatccagtgattgattgagagggctgaggtaggtggtgtcaggagggaggccttgggggagcacaaagggctggatgtttcagctcgatgaagaacaactccaacaagctgcatattctctagagtgccccacggggttggccctatatcacagttcaactcctccctctgcccaatcctgcatcttccatatctcttccataggtattgagccctcataaatacccatacatcaaactctatttcagcctctgcttccagacagtctaacctgcaacaatatatatccttctgattattgttcttagaaacttaggaagaatcgccacccaatatatctaagaaaataaatagctttcagatgctgccatgaaccactaccaatgagacagcatggcacagttgagcatgtggttatctggaaagcatgaaccctgcactctcatcctacttagctgctacccggctgggttgaccttgggcaagtcactgcccctctctgggcctcactttccccaactataaatggatgaaattgcaggaaatgacaggtatgaccccttctctaccagaggcttggattttttttcttcttctcctcccttagcccgtgttgagctatttcggagtttcctggcagggaagagcgagtgaggctgccttaccttcaggatgaccactagcaggccagcgctcacaagaagaggaatgaggctactaatgaaccagctaaaccagaggatgctgttgtccaggcccatgatccgcatggtctctttcagccgtgcctccttctcatacacgatgcccttgatgatcacagccactgagtaaatccaggccagcgtcatgaagaggggcattgaccggctcatcacccgcagaaagctggaggccccaaggaaggacaaggggagaaagaaagacacacgtgagccagggtgatgggccaaggcctctgagcctgcatgctagagggagcaccacatctgggccacagaaggacaggccctctagactctgaaatgtacgtatgatccaatgcttcacgagcaatgcaatgtagagagaaaaacgaggctaacaaagtgttgccaaaccaaatttctttgggggcttgcttcagtaactaggtaactgtgagcgatacttaaactaaaggtagattatgttaaagtactaaaaaccaaaacaaaaaaacaactcattctctcacaaaagttcaacatctccaaggtcatctcactattgacttgcttatcgtaactctaatcacaccacagacatacatttcaggcagctcttgtcaatgtttcagattccaagctagaatagaaaatgcagatgtgcaaagtaaaaaggcacacagattttggaccctgaacttgaggttcacgtcaaagctttaccatgtaggcacatactcactacatgacaacaggcaccagctcttaatgcctctgaactcctgtgccctgtcttaagacatcctttctagagtaaaccttagcttaggggtctttgtaaaagtcttcctttgaaaaattccagctaattgtttagaaggtgaaaaacaggataatttctggtgaccttgaaaagctatagatagccatacaaggaaacacactattcaatgcaaaacagagaaccaatacaagcagaacccagctcctcccgcatcctgatccctacacacacacacacacacacacacacacacacacacacatcccaccaccaccaccaaccacagagaataagagaatttccagaatctggaagaaacattacatatttcagatgtctgcaataactacacctccgcccattgtcttagaagaaatcattacatccaaaggcatagttcccacaatgagaacttggcagcttagtgactcagcactgaaagattttctaaaaagtctaagaggaagaagctttgttcagttttatttgggttgttttgaaatgtggtttaccacctagggagaagaagtgcacacatttacataaactgtgcttttataagtttagacgctgtttctgcatctatgtgtgagtatgtgcttgcatgtgtttgtcatgacacattttaagcttgcagattgagcaaattttgaccaaaagggtagagtgtaaaaaattaaagtggtgggctgggtgcagtggctcacacctgtaatcccagcactttgggaggccaaggagggtggattgcctgagctcaggagttgaagtctagcctgggtaacatggtgaaacctcgtctctactaaaatacaaaaagtcagccgggcgtggcagcatgagcctgtagtcccagctactgtggaggctgaggcaggagaatagcttgaacccgggaggcaaaggttgcagtgagccgagatcgagccactgcactccagcctgggcgtcagagcgagactccatctcaaaaaaaaaaataaaaataaaaagataaaagtggcaaccatggatgagaaggaaagaggtttactagtgtgtgcacatatatctatgtctgtcatgtggctgcaactgttgacaacttacatctggcatcttatttccagatcattcacacatgcatgcacatgcacacacatatatacacccccatctggcacagtataaactggttaaaaacagtggcttgcaggtaacttacatgtcatcaacgtaacagggatagggcatctgttgcatatagacaccagttttcttctcggtgcccgtcagcaccctgatgattgcctgctccaccacatcctgcaagtaggcgaagcccccccagacgtaccgcatgtcctcaaaggggtcagctcgaggaccagggtcccagtacctaaaaccaaaccacaggtaatcaaccattcctttagaaccatacaataaaaaaaaaaaaaaaaaaaaattgcccaaaaccctactacccttaccaagcccctttttctatttttgtatctttttttttttttgagatggagtttcactcttattgcccaggcgggagtgcaatgatgcgatcttagctcactgcaacctctgcctcctgggttcaagcaattctcctgcctcagcctcccgagtagctgggattacaggtgcctgccaccaaaattcctggaattaattcccttgagtagaaatgctaaatcaaaagatactgttattttatgacctatgaaaaaccttccagcaagtcatgtaccaatttcaccaaaatcatgacaccaagttgagtttttttgttgttgttgaaatttctaccaaatttttagttaaaataaagtacctcttgtcctaatataataggtgctctggacctccccaagaccaggctggtgtgatgggattccacttacccatccttgattttatttgtcctctccacattgtcaatgtccattcggatcttgtacttgacatgatggggcagctcaatgctgcctggagtaattccagtgaacacaataccagcccagaacttcctctcatccagcagctccatggacttgttgatgagccagacttctgttgctatgggttctagcttgttcaggttgacacactgatagaagaacagccttcatgagaacgttggcagccaggacaacaagcagtggctgagacaaatcctacactaggaggcaagggctgactacacgattgctcatcctctctctctaatcctctctaacgtagttttccaaccttcaaccaagaatgaaggattttggtttttcactgcaatttaagagaaattctaagagtaatttagggatatgttatttattgattttgtggaggaaaagaggttaaaacaatgatcttatcttacttttctgttttcttagcaattctgagtcatagcaactaaccaaccaaccagaccaaaacacctcttacccatccctactaatataatttttaatataaaatttcaaaaatttaattggacccgaattcgattttagataagtttcacaaataatgcctttttaagggaatgctttgctaccattagtcactgagataggaaaacctagaagaaaatgggtagaaatattctcttgagcctatatagaataagctagagttaatttactaaagctagagtttatttactcattcaaccactcaactaacatttattaagtgccttttgttatcaaatcctgtgttaggcttgagggatagttttgtaaatgagactatacattatttctaaacttgcctcctgcctgaaccttattgtaacgtctcagagaaagaagccgttaagtcttttctaaatgatcccagcaacagattcacctccatgaagcgagatatggtccggattgcctggttagtctcgttgaaagcttctctccaggtgtacacagaaccattactggactggacatcctctgggtgcttggccaaaaacgccacgatgtcttgggctgtccaatctaagccatccaactgctgttcccaaaagtggtcattgtccctgctgtccaacagcatctgccattccagtgagaaagtacaagtagtaaacaccaactaaatcttgaggagcactacaaaatttacaaaatacttgcatatacactgtcgttgttttatcctcacagaaaactgaggtaaatgacagtgtccctattttatatgtgagaagactgaggctgaagaaaaaaaaacatgattttaaccagggcttggtcatagtattactagatgtggagctgagactcaaagtcagaccagtctgaattcagagtccatgtgctttccactatacgaaacatctcacttaatggtattaactacagtaacaacaacaatacttcctttatatagttactatgttgaatagtgtatatgcttcaccttacacaactccataaagagggcacttttatttttttgccttttgttgttgttgtcgtttggattcagtgtctcgctctgccgcccgggctggagtgcagtgatggaatcacagctcaccgcagccttgacctcccaagcccaagtgatcctcccatctcagcctaccaagtagctaagactacaggtgcacaccaccacacctggctaatttttaattttttcatagagacagagtcttgccatgttgcctgggctggtcttgaacacctgggctcaagtgatcctcccacctcaacctccccaagtgctgggattacaggcacaagccaccagcccagtgagtatcctttaatatttcccattttatacatgagaaaatggaagttcagagaggttaagtctctaagattgggtcacacagctattaagtagcaaagccagaatgaaagcataggccctctgtttctagtgcacctccccctccccactgtgttctatcaccttcctcttttgagacccagtctgttgatcccacataaaacctaattccttcttactgcttagtttagaaaaataatgctgctggttaaaccaactaaagtacaatcttttccaattgcaggatgtacaggtcatgatgcaaaggaggcctatttccatttcttgttcccttgccagttggttcctcacatgggtcaacacgaaagagaaggacagatcaatccgctgctcaatcagcagatccagaggggccgaggcagaggcctgcacagatgtgctgccggaaaaacagcagctgcaaactcagcaaaaaggagaggcatttgcaactcctgtcacagcttcgacagagaagatgaagctctggttctaccgaattggagtctccaagggtctgaaaactgctgctttataaaaaaatcagtcttagtttcactaacattataagcttttccccccttgcgcctttgtatttattatttcaatggcagcataatgattgtatagagtatatgtaatttcattaattattcctatagtgctgaacatttagtctatttccaatttctcacaataacaatatagcaataacattttctctcatatggtgacttctttaaaattatttcagtaggctacatccctgggggtgggtggaatggaggtacgcaggatagcatattttaaaatggttctttaaattttcattccaaattgctttccaatagagaatagcaatttataccatcaccaggaaggtatgtatgtatttttgttaacataacagacacaaaattgtacctcacaagttcacagaggctagggttagcaattctgaagccactttatttggaacaaacaaaagcagagtgaagagacgcagcctttagggtgaagtcggccctgcccagtatggtttctgaacaacatggccaaaaagaatagcaagactagaaagatgcgcccactgagatcactgagcacgtggcctctctggggtgctcgtgaggggcaggagacctaagactgcccgcaggggtggaggcagagagaaaacaggtcccgaggatgggtggctaaaagcagctcagaaaagagagcaaatcagtgtcagagggttccaagacttgcccgagagaggtgccctgggacctgtggggtgaggcaacatgggtagacagtgccagagaaagcagaaagatcagagctaccccagcagaagcagaagcctcagccatcacctcgtgtaggagatgccaggctacagggggtgacaagctcatgtttgtggaattaaataaacactctttaagagagggaagaaaggccgggcgcggtggctcatgcctgtaatcccaacactttgggaggctgaggcaggtggatcacttgaggtcaggagttcattccagcccgaccaacatggtgaaatcccatctccactgaaaatacaaaaattagccgggcacagtgatatgtgcctgtaatcccagctactctggaggctgagacaggagaattgcttgaacccaggaggcggaggctgtggtgagccaagatcatgccactgcatttcagcctgggtgacagagcaagactctgtccaaaaaaaaaaaaaaagagaaagagagggaagaagcaaagaaaacagttggaagaggttcccttttcttccacccacaggctgatgactccctcatcatctgtctccagcccaaccaccctcctccactgcagacctcagtagccactggcctactggacatcgctaccacccacccagctagaaatcgagactcactttgatgcctccctctctttcactgctctgccactaagcagtcaccaggcctcatttcttgctttatgccttggccacttggagagcctcctccctggtctctgccttcattcttgcctcatccttcttcaattcatccaccccatcagagtaacgtatctacatctccccttgcctggtcccctagagcttaaagtaaaggtcctcagcttgacacacaagtccctccaaggcatgcccatgcctttctctccagccccagatccctcatttccaagcatacacactggattttcccagctagattcctaatgaatgccattgccatgtttacaaggatcttgtcctttaagaactgggagcttatgaagaattgaagcacctaaggcaaagtcaatttcagactagggaaccatctacttgcccacaaatcaaaattcactgagtcacttcacagggcctcctataatcctctgagagccagacaaacagaaaaagtccaactagtagaaatatggattccaaggagaggaccaggaagaacaggtctgaaaccacacttaggtctacggggctagatcatataaccctcctttagagaagagaccccactttaatggcatgagctatattagtcagtgtgaatccatacaaatcactgtttatgcttttctcagtataaactcctttgtttttaaagggacttcctcagtaacctgcctcccagcggatcagggaatagtcctaaacttcggaagtgttccccctaggtaggtacagtctctaaaacccagccgcccttaaagtcaataaggttcaaaacaagaaacctggcaaaatcctcacctgcttcttaaggggagcagagacaaaaggaagaggcctccctcaccatggaaacaggaaatagtctaatgattctctaactcagcccaaggcaggaagatgtgattaacagcactcaggctcaggcaaaggagacattctgttcttgctcagcctgctccacatttgaacccaattgtctctagagcacttatccctttcaagtggctctgaagcactaagtgcatttcccctccacacagtaacagcagctcatcattcacacagtgccctgagaatgagtatctcaggccagtctacatgtaacatcatgcttttgctcccacacttctttccaaaacctaccaagacacagggagatgctgtggctggctgagaggctgcagccaaaaaggaaaatagggtactgcaattactcaactccacttccaaacaccagccctcactaagttttgcagaaaactgctatttgaccgtgagtggcatggatgctgatatgcacagcgttatctctgcaccatggcctgtacttctggagaggtggtgccctgtgactttagctatgctcactacattcccccagctagataaactgaaagaattctcacctcactcacacctgggaaagtgaccagaaactcacctctccagtatcaagcaggcacatggtaataatgggagggacactcacccggacaaggtccatttcttggctgttctccatgaaggtccagatcttggggctgagttcctcccacatgccttccagatcatggaacacagccagttcctggaaggtcttgttcacctggagtcaggtggggagccagggaccgcagaaaaaggaggagaagcacagacaatgagcgtttggctcctccctgaaaagataccccatcacagcagccctgtgccagtcctccccatccccaagaaatgcctgcttgtaactatgattctatacccacgactggggagctggcccagctctggtctgcatcagacttgaggttttcactctgggaattccagaagagccgtgagtatacttagcgcacacctctgaagctaccttgagttttttgcccccagttctggggagattctggggagggagtcttgggctgggggcagcttacctcagccatgacctgccttgtggctggagtgtcaggtgtatacaggatcttcccaacgagcagcggcttcagagctttccagataatgcgggaaagaggactagactccaaattcttcatcaaatcattgcagtaaggagctatgaagaagaggagagacaaatgctcatatgcatggtcatatactgatagaaacttacaagggctttggagccagagagttcttagttgaaaccccagctctaccactactagtcatataataagtaacttatctgagcctcagttggctcctctgtaaaagtaaaattcataacatctatgtggagagatgtggagaagattatctcagattaaactgagatatctataaagaatgatgcttgataaataatcagagcttattataacgtcaatgacggataactcacgactgagctgatctggaaaaatgttttcatgaagcacaagccctcccatccagattcacactctcatgccagcctcaccattgttttcactgacaactaacatgaccaacatttaaactgactcttgaggggcaaccagaaggctgaattcagacctcagttttcaagcaaaaaccaaaatttggggctgggcgcagtggctcatgcctgcaatcccagcactttgggaggccaaggcgggcgaaccacctgaggttgggagttcgagaccagcctgaccaacatggagaaaccctgtctctactaaaaatacaaaattagctgggcgtggtgacgcatgaggctgaggcaggagaatcgcttgaacccaggaggcagaggttgcagtgagccgagattgtgtcactgcactctagcccgggcaacaagagcgaaactctgtctcccaaaaaaaaaaaaaaaaattctcaacagggcgcagtggttcacgcctgtaatcccagcactttgggaggccgagacaggcggatcacgaggtcaggagatcgagaccatcctggctaacacagtgaaaccccgtctctactcaaaatacaaaaaaaaaaaaaattagctgggcatggtggcgggcacctgcagttccagctactcaggaggctgaggcaggagaatggcgtgaacccgggaggcggagcttgcagtgagccgagatggcgccactgcactccagcctgggcaacggagcgagactccctctcaaaaaaaaaaaaaaaaattctctttaattaacacaaactagtatatgtacacttaacaaaaacccaaatacaaaagttgtaacagacaaatgggtttggttatccagcaggatccctgatttttaaaaattcattctaagtttttcagggatttttagataccaagtatcttctatatgctggaaagataatagaatttttttttttttaatgaggatgccctcacaattaagtctgtcatggaaatgaaggcttccttgggtcaacttgcaagctgggggagaggaggagatgggatttaattaaagttgcctacaataccatccttttaaggcttgtaaagcaacttgcgaatgtctggagtgctttactccagagaagaaaaggttcttgtgttacaataaagtacaaaacctgcctcactcagtgtctgaaagacacacctgtggttggaaatggagaaaggttcccctgcatcaagttttcaaggaaaaggatgccactgcctaaaactgtgacattggatccctgctgccacgaggcatacggcacacgggcccacaaaagtgcttaagtgtggggagtggatatggagacacagggttctttaacactgccttgcagctaagaatgggaaacaaagggcagatcaaatgtctgagtgtgagaacacacacgccaccactaacagttatcttagagagcacagatccaggcagatttgggcttgaatcctggctcttgtggattaactctgatgtggctctaaccaaggcacttaacctctctgagcctatgaaatgtggggttaaagaatcttccctgcagggttatcatgagggtaaaatgagataacttaaacagaatgcacagtgcacaagaaattctacttaaatgttagttctttgttgttgttgttgttgctattatcattactgttatttctttttatgttattataaagcttatctcaatggtaatattaagaccagtacatcatcctttttaaaaatgcttttctagcttttttgagttacaactgacaaataaaaattgtatatatttaaggtatacaatgtgatgttttaatatatgtatactttgtaaaaggatcaccacaatcaagctgttaataaatccatcacctcatagttgccttttttgtgtagtgtgaacacttcggatctactctcttagcaaatttcaagtatactatacagtgttactaactatagtcatcacgatgtacatcaagatcccaggaacttattcatcatgtgaaactgacactttctaccttacatatattccatatataagtgagatcttgcaggatttgtccttctgccattatctcattcttgatcaccctggaagccacccttccacatcccccagaaaaccagaaggttggctgtcaatcattcattccattgataaacactactgtgcacctgagatgtgccaggctgcattcagagaactggggacaggtagctattcaagagaagcctctctcctctaggaagagctcagtctggtgggcaaatgggcatgtagacatctaacgctgctacagagggaggagatgacacaggccaaggccagaactaagggagggatggggttggggacagggctggggtctgcatggacactcacttgtagagttgtcatagaaggtttcagcatcttcctcagtgccattgcctccaaagagggctttgtagttgttgtcctcataccagttgagagacttgatcttcagcccccctccctcgggatgcccgcagacaatacgagacacagcctggtagatttgggtggaggagctggagctgttcacattggtcagaaacatcacctcctgtcgcatgtcactccagcttctcatgctgaacagctggcgtcagggatggggacagaaaggagggtaggggaagggagaaaagggcagtgcaagggttggggatgagaagagaaagaaacatcttattttcttgacctctcaaaagccatgtcccagaacatattttgtctgatgtcatctcaaagccttgggatgagcttgccagaacctggctacccaatctgtggtccagggacgagcagcatcagcattactggagacattgttggaaatgcggattctgagacccctctgccgacctgcagaattcaaatctacagcttcacaagatgcccaggtgattcctatgctcactaaagtttgagaagcacagcctggagttagtgaagcccctggggctgggcttcgtttcaccgggattatcttccagtttatagataaaagaatgctttctctgaacagctacatctcattgtggttgagcctatcaggaactgctctcatcctcgataactgactcatttctaaaactccccgaactctagtgtagaaattgaacagccctcttccgccttgggagaaaaggtactgtatgtgaagttccctatcttggtctcagtaaagtgtcaggcaatgaaaaagcattaagatgaaaaactcgagtctgggccgggtgcagtggctcacacctgtaatcccagtactttgggaggtcgaggcgggtggatcacctgaggtcaggagttcaagaccagcctggccaacatggtgaaaccccatctctactaaaaaaatacaaaaatgttggccaggcatggtggcaggtgcctgtaatcccagctactggggaggctgaggcaggagaattgcttgaacccgggaggcagaggttgcagtgagccaagcaccactgcaatccagcctgggcgacaaaagcaagactcagtcttaaaaaaaaaagaaaaagaaaaagaaaaagaaaaactcaagtctgaaccctagctatgtccctcgtcagcttacagcctttgaaaagtcacgtcatgtctctgagtactcaacttctccatgcttcacggagctcgctgagacacaacttggcttggttttggtaaccctggggggcagtagatgcttataccatggcctggacactgccctctactcatcatcaagacagcaaagctacaacagtgtgtggtgaggcacaaatcctatgccacacaagagggtgccctgcatagaacagtcccaacagcgtgagtcagaaaccctaggcagtgtctgtgactgccactcaacaggcatcaatgacccaggcagcgttctgtcttacatgcaaatgtattccggcactttgtggagttctcagccccaatgctattatgaaatatttatagagtactttgtatttccaaacatttcacaagaaatcattaataaatccctgtattcctggaaatgtcactgcgtgttcacaccgcctgggaagactgagctatagagcacagaggggaggggaagggccacgaggccctgcacccagcctggaaagctccatatgcctagctttcaacctcacagcctgctggttcctgtgagtggcgtggtccagcactctctaggtcctaagctttgccttctgcctccagaagggaactaggctctccagaggtgggtcagaggccacaaggattttttttctccagagagggggcatctagcacactccacaagaacacaattaggtgaggtggacagcttttcccaactttttcttttcataacctgtacgaggcatacagacagaaaggggacagagaaccaggccattttgccttttgttgcttattggaacagccctagagatttttaaataacagtgagtcaaaacactcacttctctttccacaggcagcctcaccaccaacccaccactccccaatcaaaaaaaaaaatttcttcccacataaagccagcaaatctttctaaagaagcaccataaattattgagttattccaaactattgactcttcccagcacccgtttcaggggtaaactcttactctttctcctacacctcagctcacactccaaactttatctgggaagtgcttcctgactctcagggagggatggctcttcatcctttagcccacggatgatggtggtatttgaacatcatcggttgagtgaatgaatgaaactgacttactgctttctcaatccagcacaatgtcctttgtcctccctttcccccatcccagtctcttctcaacccaacaaccagagtgtaaacagtctaaactctagatcacatcatgtcccctccctcaagccctccgctggattctcatctcacccagcaggaatccaaagtcttgccaggcctgtatggcactcacctcctcctgctctgagctcctctcctccccccaccacttgctcactttccctggtccttaaacacattccttaggcatgctctagcatcaatgtctttgtatctgccattcttcctgttcggagtttccttccctcaccacagacatgctatcatctccttcaggtccaactgtcaccttagagagagctttcctaatcaccccctttaaaaaaagcaccttctcatgctctatgccccttaccctgctttttcttcactgcatatatccctcctgtggcattgtacactgacctgtttgtttctgtctctcaccctatacgtgccccaagaaagcagagaagttagcgtgttcactgctgagtcctcaacacctagcaatgccaggcagctggtcggtgctgggtggacatctgagatgctgcctccctgtcctcccttcccatcacccagatgtgaaactcaggtcagctttcattcatcttattcctcaagtcctcatttcctcccaatttccaggttctgctagtgcgtattttctttcttggaaggttctcctttctattccagtcgctactggagtttttcacgaagcaggcaacaacacaggctttggaatccaacagttctgggtttgaatcccagttttgtcaattaactcattgggtgactggaaaagttgcctaacctttctgagccttggtgccatctgcaaaatggacatgatgagacccactcaggtttgtcatgtggagcatacagggaaatgggtgacactgtctgaacctaggcagcttctcagaagacattcactccctttttcttttcctttcaagggttgtgctttggtcaaaattatcaactttccacacgctgactggacaaacaagtgcatttattgatcttctcccatttatctcacagaaatagcaagtcagacaatgagtaacttttgatcaaagggatctggaggtgttctattgaaagaggcagatggtccttgcttgtcctggaccaggagcaagcagggcacaagaaacagctgccaagaaaaacgtatattgttcacttggagagtttccaccacatcagcaatgggaacatcacctgcttccaatttttttttttaatgccagaaaaaaaaaaaaaaccagggccagtgatgtaagtgaaaacagctgtaaccaaaccctgagtttagaggcagcctcccctgttacagaccctgctttgctttctctaaggccagaaatgaacaagggacagagggctgcgaggggatctgcagagcaatgcaaggcatgtcaatgtcagctaacagggccctagagaaatagctacggacttgcaaaacagtttctctttctcattctccccctggaagaaccccagttggtccagcttctctacctagtaaaaaaggttaccagccttcataaccagggtaacaaatggcaagctgaaagaaggcttctcctctggaaaaggaacccaaaagtcagacctcatcagtcagaaacacgtgagcagaattcaaagaaagaaagtagaacaggacaggaagaaatacactaacgtatcaatagtgtttgatctcagcatttttgtattttccaagtcttcagcattttccacaatgaacatgcaatactttcattgttagaaaacataaagttcgtttttgatatttgaaaaaatgatgcaagcaccaaaaaatgggtaggttagatacaagcaccaaaaaaagaaaaacggattagagaagcagctaaaaataagggtggaccaagtctgagacaatttccccacaaattattattttccaatatcctacacgttaaagtctgtattgtttgtgagcactgccccctggctcagcttcctatgctgggggacaccagacagttcctcgcttccaagcctaatttgagacaaggctgggagtcagaaaggtggagtgtgcactggctgggagtcagagctaactgcttttgcaagtgcctacaggccctctgatcctaggacagagattactctgatacatttgtcaacatgtggacctaaaaggcaaactcaacttaatgttcattaagagaccatattcccatagttgaacctcagaagccagatgctttcaagggaaagggctgaattaggggtaccacgttattcctgttagttagcaagcatgtgtgttggtaaaatgattggccttgctactgaagaagcaatatggagaaattgctggtcagacaaaagcagtgcatgggcagtggcagagataattctcctctttacaaatgtatgattacctaggggcaaaaagaaaaaatggagaaggttctaaactagatatccagctgttagccactaaccaattagctctgagacatctatgagttttaggtttcttcatttctaaaataaggaaatcaaaacattattgtttacatcacttatactttgaaaattgatattacatcccatgtgatattcaactcaaaaggacctcttgccagactcaggaatgaaaatactgatacagtggatgatccgcttcctggtactggaaagacacaacttacctcctgggccagagtcccaagactatgcagcaatgtttttgtggcttcagccagctccttgctcgggaagggagatgtagagtttagtgttctctgtaatgagaaagaaaactttgtttctgaattcaaatgtaaacctgaaatctctattggaaataaacaagtgaattaaaactgttcacaatcttgagtttaacaaacaagaaaccgactcctaaccaaaactaaagacactacaattatttctaactgtaagtttgcattttgttcattttcaaactcattctttgattaatggttttaaatgaagtaggaatattgtacttaaaactagttaatatgcaatagattaaaaggatctcatgtgggctggggggatgtgtccaatacaactctgaccgcaaattcccaaatctgtctgcgtctgcaagatgggtaatacgggaatggctttgagaaacaagttaatgacggctcacaagaaaggaagaaaatataaagtttaaagctgtcaaaaatagggaaagatggaattctgtcactctgttcaagtcagcactgtttctaacactggaaattgaatgtagaacacttatttttacatcgagttttagtcaaatctttatatgtaccaattcatatatttaattgctgttatatgtcacctaactgcacagcagatataggacaataattcattagaacagggaaaagataaattagggcagaaagcataagctaaagaaaaaaaagaacaataatttacagactgtgaagtcagaattgctatagctgaggagcctcaagttgggttctgagtgttcaggcttccaaagagaaaaagacgtgagatcagtttcttcactgttatttgtcaagcaggaaaaaagtatccagggaaaatccacctttcttgatgtttctatgagcattgttttattcaatatcatatcagacatctctgaagtttagagaaggttgggctattttgacatttgtcatatcagagactgctgtgaaattataatgtagactacacaagaaaatgtctagaagtggctgggactcactatctctgagaaatagctgcctgggatgttttctttcaaagagaattccaaatgcagaagggattgagtatcattctgatcatcacaatatccaagcataatcctcaatgtgcatttctaagaaaacctgcctaaaggttctatgaaagaacttgtccagctcattcatctcttctggaacgggttcttcaccagagtcccaggactcccacattcacagtcctcaaagggacctacgcggtctcccttaaacgtcagactcagataggcctctgtgatacgcagaggtgttcatgattgttccttccatagagagtaattcatgagcaaaaacaggtgaggtgttttgtttctactttctctctttgggttcactttataactaaaggttaacacactagaagccgaacctagggagaacttgcctggaaaactattacaaacacaaactgagagatcttaattgaaagctataggaggtaaagtgtttttgtgtttaccgttaggcctacaagatgacagatgttcaagacagcatagcaaaaacaaaacaaacccaggacaaaacaagaaacgccagatccacataacctaaatttaagaaaaacttaaaaacgtggtagttaatccacttcttttataaggactcaatggaaataagattgttaggattcttgtcactcactctcccccgccaccctgtgccccaattctccagtcatgggaacctggggtagctatagaaccctgggcaaatgactcaaattccccatccttccattttctcgactatgcagcaaagtttaaaatgctgtgcacatatcacagagtttttataagcactaaaactagaggatatgtacaaagcccctcgcacagtgcctggcacatggtaattcctcacaattgtcaacaatgtcatcccctgcctttttcttcccttgcatgaaagtttactgccaaaactggagggcttttgtctgcaaacagggttttcaacttcttaaaaagacaaacatcctttctctgtttctcggcaaggtcttaaactttttcttctattgaaatgtccttcctctgctaggcagagagctagagctatcatcacacagcatatcagccacactccaatgtgctgtctctaattgtataattactccccaccacaaggtgaagacatcctcatcctgattcctgaaggcttgggataaaatgcctttctccccttctaacccttttcttttactgagcatttgccaaacggcaaaataaaagataatactaagtggatgaaatatacatgatatgcataataggttgtgtatagatatactatatgcatccatgtatgtttttacgtatatgtctatatgtatagacatacatacacacatatatcttacacatattaactggcctcaaagttgacatttcagttgaaaaacctgaaggaaaactcaatccctatggtaggtatgtgtatacttatatgtgcacacacacacacatatacatctttatcttaatgtatattcattatgtaccttctctttaaagcaggtgatgtttttacagcagtggtatagcttcccttgtaattaaatttaattatccaaaagaagtgacttaatttaaaaaatatattaactaaaaatgctaccagctgcacttgaatatgaccaaaatcatggcagaattgtaaatgactgggattcactaacactgtgaggtttggggagctactgtatcagaatcacctgtggtgcttgttaaatatgcagattcaggctgggcatggtggctcacacctgtaatctcaacactttgggaagccaaagtgggtggatcacctgaggtcaggagttcaagacgagcctggccaacacggcgaaaccccctctctactaaaagtacaaaaattagccaggcatggtggcatgtgcttgtaatcccagctactagagaggctgaggcaggaaaattgcttgaacctgggaggcagaggttgcagtgagccaagatggcgccaatacactccagcctgggcatcagagtgagactcggtctcagaaaaaaaaaaaaaaatgcagattctcaaccagctaacacctactgaatgagaagtttaagagtgtgatccaggaatcctcaggagactcttttgagcactgaggtttgagaaccagcaccatgttcacaaagcctcccttcccagtatgctttgcgccaacgtgcttggtggtatattctgtgtctggtccgcatactacaatctgcttcagactctgaagcagtgaagaggccactcggttcacctggccctgagtaggacccaagatggtgccaaacacatggggtgccaggtttgtcacaccaattagatacagtagtcaccaagtgcagatgtttctaaaaaccccaaacccaacattcacccattgtcaccattaccggtcatctgtctcctgaagggtacaaatcagtgaatgggtctgttgtttgtataaaaggtcttctccaacttaatgaatttacatcttcaagggcaatagtttttccaacatctttaggacttttagtttaaatttcttaactctggagcaagcttattctccttctcttaaaagccccacacttcagcaaaactccaggcacacagcagggcctaaagcatgactgtttaacccaggaatgtaattgagcatggatgtaaacataggtccttattaagtttgctgtgggcatcagatttttacattagcagacacaaattcaatgccatatcttatgatatgaccttcttatcagtagtctgtatgttgggtttgactgcttgtttaatttgactgtttttggttttggtctccaacagaaacattggctgaacccacccatgagtaataaggtagaacagtcaatgccattgttagaatcatttttaaactagttctttattcgagattaagtgctcagcatttactaataatattggcaatctgtagtcaatataaacaaatttccattttcaaaggaatattggttggagttacacaatcaggcatggattgacatcacagggttaacaaaacacacatgattcaaattctacatcaagtttaaagcttggattatccagatattttgctcatgacttaattttacttttctgtgcatccaaaacataccataacctgaaaaaataagccaaagactagaagcatggatttttaaaagtttagtataaaaatagaatactatggcaaaaattaaccagattccacatgtatcaacattgataaatctcaagaacataattccaaatgaagtggcaggccaatatgcacacttatacaatgtgaacacatttaggccagtaccaaatattgttatacatagaatgtaagtatacatgatatagaggattaaaacatccaactgcaagacaagagttatctctgaagaatgagctagggaaacagaggtggcatcagctgtacctgtaatgttttatttcttaaatagaacctggagtcagcacggcaaaatgatggatgatggtacaggagtgttctttttgtttgtttgtttgtttgaagacggagtctcactctgtcacccaggctagagtgcagtggtgtgatctcagctcactgcaacctccccctcctgggttcaagcaattctcctgcctcagtctctcacgtagctgggattacaagtgcacgccaccatgcctggctaattcttgtattttcagtagaggcagtgtttcaccatgttggccaagctggtctccaactcctgacctccagtgatctggctgcctcagactcccaaagtgctgggattgcaggcgtgagccaccacacccagccaggagtgttctttatgttattctctgtaccttttttcatgttgaaactatttcataattttctttttaattcaatgaaaagataaaagaggaaggacaggtgagcaggaagaaaggaagggtaaagaatctatgttggcctgagcacatatcagatctaacagacagataacttccttgaataaaattaaccccaggaaagaattcatgccttgaaactagaacacaaaatacggtctgagaatcatgtgtctgcacctgctattaactgtgctctcctgctcatgcttacttgacgaaggcagacaaaacttgccaaatcctatttccaaagagcttcagtaaaaaattcacagcttggaattcctactattatttttctaaccaaaaacattctcttggctatgaactcacataggtctccattgcacccaggagacaagtgactttcttatacgaagtaaaggaaatgggaaaaagaaggaaaataaaacctttagtgagggactatattttctgagttaagataacaggaattcatgtatgactcaatattttcagatcataactgtaatgtcattacaggaagaatgcacaaatgcttactgttattattcaaaagctcccacccacttctgcaaaatgtgttaatcacaacataccatgtttcctaaaagcatggcattctgtgacattggccccagaaagataaaggctgttgtgccccattctttctgggtctaagagatggcttcattatattctttccatcctcatgaacttagttctgctccaaaggccattcacattcacagaaatgctctgtttcgtattcacctcatcaagtcactcagcctgtggagcctttaatggctccctttactctgaggataaggccctatatcctcacatggctcgtgaagaaagacctgcctcagccgacctttgcccacctctgcaggcatcacgtctcatcgttccttctcccatcaaactccccacagctatatctgctccatgctgaactatctcaatcaggtacagttcccctaaatgccaccttctcttccctctcctctctggaccaatgcatatactatgtcctctacctggaacattctactccctgttctttacctggctgacatccattctttaggtccccacttagaggatgtttccttcctgactggaaagactgcagtaggaggccccatcagggactgtatcacacccagcagagcgtctcctgctctatacggcagctgctcctttcctggtctgtcccacccattccccaaccaggaatgaaacagagagggctggaccttgcacatgactacctccctgggccagagcatggcactgattagggctcagtaaatgtttactaaatgaatgaatgcatttgttaatccattatcactacacgaaatgaacactggaagataatattacaatgcattaggagtcacagccaaatagaagtagaaaacacatctgtgcaattaaaatgcaactgaaaatattttcaacttataaaaatctcatctacatctaaatttttcaggaattctatgacaaaatgagacgtgggtatacatatattggaatagtattttcaacacaatacacaattttgttttcctcctgggaatgcatgttacaatgtgttcattgaaacatttcaaatgtcctttaaatatcttcataaagtagacaaaaatctctacttcactttgaccatatgcaaaatccaactcaggctgggattagtatgttttagttcaaactgaaaacaagtaaaccacaaatcaaagactatcaccacccaggagtaattgctatctctttctggtgatttctatgacagtaaagatttcctctgggaaacattttaatattttttattgaaatacgaaattataagactacatttctaaggaatattctaatcttttaaaaaataaatcaacaacctaaatattaactttcaaattagatgtgtttaacgcattcaaacgcttcattttttgctgtttctaaacatagttaaatacatctactaccacataattcagaggaaaaaattaaacctgtatcttagatctggcaacaatatttaatgaagaaatagtataactaaggtgaaaatgtctgtgtaaatggagttgagcagtcatattaacacactgctatatctaccagctagtgctcttcttttcccataagaatgaggtgaacatagagtctgaagagtaaatctacacagtgtgtcattccacccattaccaacccatggggattgcggctgcttgctgggagaaagcaagtaaacaggtgggcagtcaaatcacacaaagccaaacaaaatctgatactttccaacaatgtccgggttccagacaggagaacacgagcaagtgttctctcctgcaaaaacccacacagacgctttaaggactgcatgtaacaagctgaagtatctagccctaaaaagccatgaggctgaaggtaacaacaagccccatctgtattctgggtccttgtctaagagtcaagaagaagctaaataaagacccctcaagacaaggatgactttgttcactccttatccatctgcttcttcgatctgtacacagctcagctgtgacattacttgtcttctgggagcctcggggcaccctcactttcccttctttccctcatgaaccaagatccacttggtgggaatgtgctaggcacactggaagacacgtggacagtggaaccactggttccacaaaaaccacttcttttttttccccacgttattgagatggagataaatctgcatgcctggacttccaaccttaaggatcagacaccattttcacatcactgaggcaatggtgagtcaaggacagagcccaaacctagctcattcaaccccacattcctcccactacagcccacagtgtctgtgttggcaaagactgctgtgagggagctggtcgagaggtcatcagtgaaactggaacgaggacagctctcactctgtagacccaggacctacaaagaattcctcaaattcccagactcagccttcagcctggatctcaatgcccatcagaatgaaagctccaagtgcatcacaactgccttgttggtggtcgaacttcagtgcctagaacagtgctggtataaagcagacatacaataaacacttgatggatttttttcgatgaatgtctcatacctagttcagagatgttctcctcccaaagtcacctctgtttggtttgtacattaaaaaccctaataggtgatgcttattatgctttagagtcactttccaaatatgggcaagaaaaagcagagagctgcagaggggtcaacaaaagccaaaggcactgagggaacacttcaaatatatgataaactattccttccaatcaagaaagctacagcagactgaatatcccctgcaaagatgtccacaccctattcctggagtctgtgaatatgcacatttcatagcaaatgcactgtgtagatgtaattaaagttatgaacctcaaaataaggagattatcctggattatgtgaatgggcccaaactaaacacctgagcccttaaaagtaaagaactttctctgactggagacagatgtgacaggaggcgtcagaggtttaaagtgtgagagatactcaacccacttgtgggagaggagtcacatgaaaagcataagaaggaatgatggcaacctttaggagcaaaaaccagcccctgctgacagccagcaaggaaatggacttcagtcctacaactgcacgggactgaattcatctgatatcctggatgagctccaaagcagattcatcttcagagcccccccaaaaaaacacagccccacaaacaccttgatatcagccctgtgagcctctaagaagtagacctaggtgagctctactgtatcctggcttctggccttatgaaataataaatgtatgtggttataaactgctaagtatttggtgacttgttatagtagcaataaaaaaaaaaagtacaatcggaagcaaatcaatctctcgggccaaaatttgctggtccactactatggctccttcctgcagtccaaaacagattggaggtttctgtgagacaggaaggtggccctctcctcgctctgggaaaggtacatgctgctttaggaaggacccaagagaaagttaagaaaagttcacctgcccagcacactctacagcaaaatacaccttgctgagcagcaagacaaaagaagcccctgccaggtggccctgagctcctcctagaagttgttaactcaacagtacaaatacaatgagcgcactccataacaagtctccctcatgactaagtgcatttatcccacagataatatttcatatatccacccacctttgttctcatcaaaaggatatcttttgagttgagtccagctcctagaaaatacctgacacataataagaactgaataaatattgctcaatgcatgagtaagatttttaagtaaaaagcagagaacacctaatggaaactgctcttaaccccagggaactttaaaaacacaacagcgttctgacatccagtattaattttcacacaaggtacggactgagacataaataagaatctttgggtgaaaagtcttgacaatatctgagcaagaatgcagtttttcactgaaatactcaccaggaccacttcgcttggtatgagttctaacactgatctacagaagaaaacttctatcttttttttctttttctgagacagagtctcactctgtcacgctggctggaatgcagtggagtgatctcagctcactgcaacttccacctcctgggttcaagcgattcttgtgcctcagcctcttcagtagctgggattacaggtgtgcgccaccacgcctgcctggcaaatatgtgtatttttagtagagaggggatttcaccacgttggccaggctggtcttgaactcctggcctcaagtgattcatccgcctcggcccccacaatatgctgggattacaacagatgtgagccactgtgcctggctgaaaacttctatcttgacgcaattgttttcaaggacataatttctactactcatgtcaattaaattatcaacttctatttattgagcacctattgtgtgccaggccccacaccaggctcttcatatgtgtaaccaataatcacaacaaagagtcaaatatattatgtgtatgtagaagaagagaaaactgaggcttacagggactaaataatttatccgacatcaatgctggtaaaatattcaaatgcaatattcaaacccagacccagctgaccctcccacactgccatactttccccatgttgccaaaacactgctttccagagcacccagattctgaaggaggcccaggagaaactcacaatacccttggctggaaacagggaaacactcacgcacacacaaaaggagaaatgtttcaaaatatgtctctcgtgaaattccacttttggtacagaagcacatattgaaagaagagtttctctccccatcatgttgggctttgcatctccggttgctgctactgctgcacttcttggcacagttaactgcccatgtgcaatgtcatcacatgtcacatccatctaccatcacaaatgttgaaatttcaaccaagcagcaatagaaaaaggctgcttaatgcaaatcaagtatcagtcccagcattccaattaaggccctgcttaattcaataagtaagagtcacatttcaaaatgtttggaagtcatttcatcctaaagccttcctcagaaatcatctttacacaaaacaatcctgatcactcattctactctaactcaagagccccattttgaagagaggtctcttggtaacagcagaggggcagaagcagaacctgagtgctccacaaacccgagatatgcagaaagcacctggtagtagccaccttaatcaatacctggtcataaaccaacgcatccacaaggcacaaccacaacacagcaggatgggacacagtgtagctgacggttctgaaggtgcatttccctgcactctgtcacgctgctaatcctcccagagagatactgtcaggttgaaacctgagctgttaattatcagatgatgagggctaaacagtcattctactatgagtataattcaggcattgtgtgagtggagggattttaccgggttgtgtacacaataggtgtttaatgagtaaacagaagtgaaatggaatgaatgggcacagcaccggaacaaattacaatgtcttctaaaaacacccatcttttccaaaatttcaatcattccagctgaaagggtgagcatttgtcatgcagtgaagcagcccaaaacagtccaagaaaatggttttgtaacaaagttttgtaccattcataataacctttcaccctctatgattcacagcacaaaaaagaccaacaggctgcaaatgtctgcacaagtcagcttctctaactttttaggccagttacttagggttgcaaagatccctgtagagaaatataccttactttaaaattataacatgggaccaggcacggtgactcatgcctttaatcccaacactttgggaggccgaggtgggcagatcacttgagctcaggagttcgagaccagctgggcaacatagtgaaaccctatgtctactaaaaatacaaaaaatagctgggcgtggtggcaggtgcctgtagtcccaggtactcggaggctgaggcatgagaatcacttaagcctgagaggcggaggttgcagtgagtcgagatcgcgccactgcactccagcctgggcaacagagtgagacagatctcagctcactgcagcctccacctcctaggctcaagcgatcctcctgcctcagcctcccgagtagctggaattacaggtgcccaccatcacgcccggctattttttgtatttttgtagagacagggtttcaccatgttggccaggctggtctcaaactgctgacctcacgtgatctgcccgccgtggcatccgaaagtggtgggattacaggcgtgagccaccacacctggccgatacaaaaactttttgatggtcaatcaaaggtatgaatcctgaagtgtgtttctaaggtcacattctagggtatgatctgggaacagggtccagaaactgagtattcttaattctctgggaggaccaactctctataaagaattcgtgctgcacaaaatccaagagtattacaatttcattttattataataaggaacatctctttccagatacatccttcctccaggaatctttccctggttttaagagaatctatctggtgagtagaaaaccagaatcctggatattaaatgatgatgtttggggtagcgagaggaatttcaccagagctctcagaacacctagagacatatttgttctggaactatataaaacactctgatgaccaaactgctcaggctcaccagtattttttggttaagaatgaatgggtattctcatagagtgcttctctgaactattgattcctaggctgaaaaaacttcgtcggaatttttctttgcaatgttattactaagtaagctaaatagtgtggtctcatctaattccagggccttccaactgtgacagcccacaatgtcatctttatgatgggtttttaaacataaatagatatccatcttcccatcaatggtttcaagactttttttttttaaatatgaagaactctgttttcaaatgagctcttgcttagtattataatagtaaaaacatgaaaaagcaggtcttctctgattgaaacaagcacaaaaaacttttggcttaaactcagccacacccagcttattcttcccattcaccctttgggagatggcccaaaagtctgaaagaacactaagaacacttagaataccactgaactaaattatatcacaaactcccagccagccgtacttttctacaaaacaaagtcatgctgtccaaggaaaagcctcacattccgaaagcattagtgcttgaagtttctccagtgagcaagtctactcaccaggattggcttcaggatgtccatgttggaacgaagtactcgctctgctgcagccagtttctcccttggtaggccacaaagctcagaaacttcttggtcaccaagttgaatcatctcttctgattttgatccattgcacagacttgtcaaatgtaactggtagccttgcaaaaatacctggaagcatttcatgcaaagagagacaagcacaagaggattatgaagattggaagctgggtccttgaagtcttttggagaacttcatatcaatacagctttgaagatcttaaaacaggttccattgcaacagtccaatgcatcaggtctctttactgaaactcagaatgtatcaaagcacaaggcacaatgacaggacacttaaaacctgcaagttgcattaactcagtatctcccacactcttgtccctcttgcaaagaaaaatccagagtccaactcgttttcttaagagtgggacacatgatttggcaaacaggaatccagagtctgaattcctggaaccacttttattagatgaacaacatcctcactattttgcaatttatgttgtctttaagtaggactgggctgaaatatggggagaaagcatttatgctatttatctgtaagtgtagatatttaactaagacacagaactatgttctaacaatttcagaatttggaattctccattttacttgccctagagcagagtgccagaaagccaggcctcttatctcattgataggccaattctaaatcattcttatcttttctttataccaaacccactagagagcctcttcttggtcatattttacttaattgcctttctggacctaaactattctacttcatacgtggtccagtggaccacaagctttgaaagaagagcctgtttatcctgctcactttgcatccacagtgctgaaacattatagccagtatttgttgaaggaatgaacaatgcagactctttattacaccattactaactgccctgtttaaattggggcaggctgatgtgcttgtagaacaacctaaggtgagtgatggaccaaaagcctctcaaaacccatgcagcttttgaaatactgcagaacatttggcctaccatgattcccattaagtttttgctgactgccagagatactcaagcacacttcagttctactcatttctttaactggtccttgctgctaggctgtcagcctacagttagtgtctatgtttaagaatactgacaacaggccgggtgcagtgggtcatgtctgtaattccaacactttgggaggccaaggcagacggatcacctgaggtcaggagttcaagaccagtctggccaaccaacatggtgaaaccccgtctctactaaaaatacaacaattagccaggtgtggtggtgcatgcctgtaatcccagctactcaggaggctgaagcagagaatcacttgaacctgggaggcagaggttgtagtgagctgagatcacgccactgcactccagcctgggtgacagagcgagactccaactcaaaaaaaaaaaaaaaaaaagaatactgacaacggagggcctttgttgatgtcatcttctgcctctgcccaatcatgctttgttccctttcctttccttacacaagtattgatcccaagaatttttcaataaatgtcttgtatgctcaaaaaaaagaatactgaaaatacagaaactccaaggaccatccaaggaccatctccatgcttaggatgccccttattttaaactgattagatgtgacagatatgaaattggcagggggcaatggaaattatgctaaatgcaactactttcaaaagcctgatgcctttggcccatctcctaaccacacaattggtaaacacaaggcatattttcctagtttcagaagggcacgcagtaagcacatttttctaattttaaaaattctagatcatgtgaagcaaaaagcttattttcaagaataaacatttccactacttctgcttcttgtaaagacaagctagtatgcagacacgagataggggaggaagcagttcccctttctgccagagaataagctcaaaaagtgtctctgaaaaatcaataaccatgcaagctgggtctggtgctacccactgcacaagagctgtctaataatgatgccagaggaagttttctatgattctaaagttaaaattcaacataaacactaatattatttcctgattttataaaattctttttttttttttttttttgagatggagtctcactctgtcagccaggctggagtgcaatggcgtgatattggctcactgcaacctccgcctcccaggttcaaacgattctcctgtctcagcctcacgagtagctgggactacaggagcatgccaccacgctgagctaattttcatatttttagtagagacaggctttgccatgttggccaggatggtctcgaactcctgacctcaagtgattttcccgccttggcctcccaaagtgctgggattatagacgtgggattacagacctttgaagtgatctcgtccatcccacctgagctttgtgacactagtccgttcatttctgtttccccagtgccatctcacagagctaaaattggagagatttaaagccttattcccacaagctgcagggactgatctcctatttaatgcaaagcaagcaacagttctcaactcagtgccactgcgtccagcccttattttataaaattcttaaaagtctccaaatacacccttgtctaaagtctcctgtcctcaattttttagacagagctcctccagatcaataacccttaaccacggttattgcctcagaactgtgaatattttttaagtttaactcaacttaaaatgtatcccttgtaggaggaaatcatcacaaatgccaagtgataagccagaaatcaattttattttaaccagctggcccatgacgccaggttgcatattccactcctggatggtttggcaattcctgcctgaatagggaagtaaaattaagtgaagttgtattcaaactacctccctccccttcaccaccattacaaggacaagggtttattcatttctttccagtagctgcacaacgtaattgccatcagccctactgaggaagctggaggcatcagcttaccttgtggagaatgacatcagccctcagcatcttgtccacagtagactttgggagagagaggttgtgatacaggaacccagagaaggtttcattgtccaccaggaaatcttgaagcttcaagtctattgagaaatagtgttttatttttatttagtaagtaactcaaaaaaaaaaaaaaagtgggcacaatgggacagtggagaaacgttatcataatattgatgatcaacagttgcctggctaaacacacacaggaatgagataggggagcatcgccatatcaggagaggcatgaaaatattgctttctggtaacatgttgagccacactcagcatgtgctcctcaactcaaacagtgtgatggtgctgttacacacacacacacacacacacacacatacacacacacacagcctttccttttctttttttttttttattttgagacggagtctcaccctgtcacctaggttggagtgcaatggtggaatctcagctcactgcaacccccgcctcccgggttcaagagattctcctgcctcagcctcccgagtagctgggattacaggtatgcatcaccatgactggcaaatttttttttttttatctttagtacagacagggtttcaccatgataggcaggctggtctcaaactcctgaccttgtgatccaacctgccttggcctcccaaagtgctgacagtacaggcgtgagccaccatgcccggtctttctcttctaaatgatctcacccaccccacctgagctttgtggcactagtccgttcattcctgtctccccactgccttttcacagagctaaaattggagagatttaaagctttattcccacaagctgcagagactaatctcctgtttaatgcaaaacaagcaatggttctcaaacttaagtatgcatcagaatcacctggagagcttgttaaaatgcagactgccgggccgggccgggccgggccgggccgggccgggccgggccgggccgggccgggccgggccgggccggcccccacccccacccccacccccacccccacccccacccccacccccacccccagagtttctgatacagcggccctgggatgcgactggagaatcacttacaggtgatgctgatgctgctgacctggggaccatgttttgacaaacactggcagagtgcattacgcatatcaaagtgccttcacagacatggtctcattttcattccaaacataaaacatgtgatacaaagctccaaaacccaggtctgccaggctttaggaaaacacattaacatatatttaaaccatcagccctattaaatgatttgattgctaaaggatttcatacggaatctccctaaataataggccctctgagtacagttagaaaaggcttcaatccagtgcaacaaaacagaaaaagcagcactaagaatccagaattttagtttctagagttggaggctgtgtctggtggcgtccctgcgtacctcatgtcatctttctgaacctcaatttcttgatctccaaaatgagaggtttctgaccagatgcttggtaggagccctatgactccgaaacagtatagttttccctgactcatctcatttggctgtctacctcttctccttccaacccactctcctaacagcctaacttctttgtaataaagataaaaccagctcatcaggaccacatgaactgagcccacatggccaggcactaagcaacctctagagggcaaactttgcaaactgaaatcatttaccagaagagaaacaggtttgatctgaaaatggggctacagtgtgaggcttaatgaggacaggagttaatccgcggagctaagagggtcacatgcagagataaagtaacaggagggcctgacagcccagccagtctctcataaatgctgtatgatccaggtgtattctgctttaggcaaacttcagtaatattgagttatatagacagaataaattgagcaagatttacatcgctagagaaatgattcactgctacccctctatggctagctcctagttattcctcatgacagccagtagctgttcttaggcccagttagtgtccctcagaatcagtgctcctgcaaactgctacctacctgatgcttcccatcacatgtgactctacactgttagcattaggctctctactgcagttgtcaaacctcagagcacctaagcttcatttagggagcatgcgaaaatgcagtttcttgggcccagtccccagagattctgaaatagtgggtctagagtgcagagcctacaaatctacatttgaataagcatcccttacacttttaatgttgggggagggaggtgtggaaccacagtttaaggaacattgttttacttgcatgttgtctctaccagactatgcctataggatagggaatatgcgttcttagtaccaccaatgcccagatcaggcctggcacagaattactgcccagtgaagggtagctgaatactaaacactaggagatgggattagggctgacaaggttccaaaagtatctgagtaccatcataggagatttccttttagctggccaggtccaggaagagcccagggatgtcaggaccatccccaggccacaccccaggagtgaacaggacttctaaccactggaactgccttcccaggaacagaaagcgacatccggggtcactttctgttcttgggagaaacaggaaggaaggtgtaagctggtgtcttcagttgaggactggtgtgaaaaggtagacattaatcactgtacaaccatggaaaaagcaccaccctgggagtcagaaacctgggttctaaatccatttatttgtcgagtcatttcatgtagttgtgcctccactgccttatctataaaatgaagggtcaaaaaaggcctctgtgaaacctcaacagaaacagaatacacgtattagctaaccctcactgactaggtgggccatagcttcctcctgagcagagccagagcaatacatcatattgcaccagggaacttcaaaacagctccctccttcccaagcagggtggcagaagtgtgggagggcgacccaggccacccctgcaatgggcctaggtcatcctgcaacactctccagaccagtgagtgtgctcagcatgtttataagacttctgttatgttaacaggctctgaagatgagaacatctggatgtgatcaagctccagcctcctatcagtgaatcccccggatgagacataagaacccagagactgattaaacagtcaacaacccttggctgtgcacgtgcatggtgtggtaggttcgctgggttgggaagcagcagggagggccaaagatcctccactacaaagaacttgcagcctgatcacgtggatatccacccatgtaggcttagactcacacactagcaccaacctgtgtgaaaacaggaaggcaacatggtgtagtatactggttctcaaacatgactgcccgttagactcagctgggggcttcacaaaaatcccaaagcccaggccacaccatggagcaactaatgagaactgctagggtaagacccaggcatcagaatttaataaaacctggctgggtgaggtgggcagatcacttgaggtcaggagtttgagatcagcctggtgaaacccagtctctactaaacatatcaaaattagctgagtgtggtggtgggtgcctgtaatcccagctacttgggaggctgaagcaggaggatcacttgaacgtgggaggcagtggttgcactgagcagagatggcaccattgcactccagcctgggtgacagagcgagactctgtctcaaaaaaaaaaaaaaaaagaatttaataaaatttttcaggtgattgcagccaagtctgagaaacaatgatgtgggggaaacatcagggtttgggaccagaaaaacctaaatttgatactgcactctcctgtgaaatagctgtgtgactgtgagaaagtgactttacctccctgagcacaaattttcttaccaattaagtgaaggtaatagtatccacatttcaaagatatgaagatcagagatactcatcatggtaggtgctcaatatatggtaataatttgtgattatcaaaaagattttttcactcaactttaccaatgtacaacaatgccatttatagaaaagatggggacacagtccctgccttcgaggaactttcaaggctgaaaggggagataaagaggcaaatcaattcaagaaggcagaaggaaggataagcaagccaaaaggagacagtaaatggaagcactggcccaagatgaggtttatctgtaagtgcttcatggcgagcaaccagactggagccaagttctggaaaaggacagagtcaaaaatccctagaagtggctggagaggaaggggtaagacctctcatgatgacaacgaccaggacattttgtggtcataatgctatgcacatagtagattctcaacaaatgaatgaacaagcagataattagagaagagatttctcaaaacctcagatctgggtagtaggaaggggagaaaaaaggagggggtgaggacagagtacagtggctttgtatctgctggtctcagtcttctcccctatgttgctggcaggaaaatgggtggaaagccaagaatattaagaaagccagatgtctgaaacataccttctcctcttaccccatcctcatgacatggcccatgagtcacctcctccaggaagcctgccctggccttcccatcctcaagctgggttaggtggccagcccttttttgtgactttttttttttttaatacagagtttcaccctttcacccaggctggagtgaagtggcccgctcttggctcattgcaacctccaaagccccaggttcaagcaattctcctgcctcagcctcccgagttgttgggattacaggcacccgccatcacgcccagctattattcctttttgtatttttagtagagttggggtttcatcatgttggccaggctggtcttgaactcctgacctcaggtgatccactcgccttggcctcccaaagtgctaggattagaggcatgagccaccgcgcccggcgttttgtgactcttttgtgcccaacatcctatgttttccactagtaccacacagatcaagctgcagtcacccatgtaaatatcctgctcccagaagaatagaaattccttgagggccagggtttttaattccaaagccagcagtgcctggcacagaggaggcactcagtaaattggatgaatgaatgaatagatggatggatgaactaatgaatgaatgaatacaaatgagtgaataaattaatgacctgatgtgatttggggaattgccgattgcagagaagaaaattcaccttgcagtgagttagggaaaagatgaagcaggacatgaacttgaaacaaaccaagtaaagaggacacaagagttctgctaaacccactcagccacgtcagcccagatcaagaggagagtcaggtgagtggcagctagaagcagagtggggaacaggagagaggaaggctgagttgattaaatgataaaatggagatgacaatggcatccacctcattggactgagctaggtgttaaatgagcaaatgtacctgcagacctagtataatgccgggcactgagtaaggtgcccggtaaaggatggctaatatcatcatcattttcaggaatgactgatctgaacagattcatggctaatttaaccttaaagcatattcagaatagacaagacacagaagtggctttggcggctaagttgagatgttgaatttgtgatctaaggtatgcacatgtgtgtatgtgtgtgcatatgtatgtgtgtattataatacatattagcctggctgagttcctaagacagaattattgagttctttctgctgatactatctataaggtaaaggaaaggttgaagctgactgatttgtctactcataactttatgaaagaataaataaatctagtattttacagggaatcaccaggaatgatcatatccaccagtcactgcaaggatggatataggtggaagatgacctggacgaaagaccaatcattccacacaagacagggaatacttcctgaacaggagagtcatttagccacttaactttggccaatgagttaatgcggacctggattttataatcagtaaaatgtgtgggttggagaagatgatctctgaggtcttcttacctgacactgaaaggaacacagggcaaaacaaaatcagcactggatacagcatcacagggtctgaattcaagagtcagctctgccatttcctgactgtgtaatcatgaagctatactttcccccctatttaaatctccctaagcctcagtttccttggatataaaatggggctaatacagcactttgggaggccaagacgggtggatcaactgaggtcggaagttcgagaccagcctgaccaacatgaagaaaccccgtctctactaaaaatacaaaattagccgggtgtggtggcgcatgcctgtaatcccagctactcaggaagctgaggcaggagaattgcttggaggcagaggttgcagtgagccgagatcacgccattgcaatccagcctgggcaacaagagcgacactctgtctcaaaaaacaaacaaacaaaaaaaacggggctaataacattcacaggttgttgtgcaaaccaaagatcaagaacgtgaacgtgctgtttcaggggaaaaagctgacttgctccaagtgttcgctcgggtaactggaaggtatgacctctgtcacaggatgcggagctgggctactgctgccagcagaagagaaagtcactatccagcagaaggtcaagagggctctcccaccacagtctcttcaatacagaccaaaatacttgacctgctgagctcagcctccttggttttgcctggaggagcaaacagtgacctaccaattagccaagagcttctgtaaagtggggcaaaggaaaggaaaaagaacaaaaaacaggtgacatgtgtgtttgtgggctggaagaaacgaagcagaaccctcagcttcttgccacacatccaggcctctgggaccaagccggggaaccagctgggacctctgggacccaggtccaggcctctgggaccaagctgaggaacacatttgcacgtgcaggcggaggggtatgacgcggggtgggggcgaggtcctgctttccaggccattcagtgttccttcagttctctgagcatagaggacaaggaaggtgggaggagggaggagagggaagagaggggtgaaggagcttgggggaggctgggaaagaaggaggaaaggagaggagggagagcagctcaggaaggcggaggaggaaagccctttgctgagctgagctgagccagacggggttactctcggtcagtgccctccagtccccagctcaggtttcaagatctgtcttctcttttgctcaacatgaaaaggaaccagagcaatcagctgctttagaagtgggtggaggaggcaaatgaaaaaaaaggagaagtagggaaaatcacatcagcatcccaggcccagatggtcttcttcaatggacccctggggtgggggtggggtggggcctcccagcctgctaggagctgtcaactgagcagggcctgggagcgggagacaaattctaactcgtggttttaatcagcctgagcttgtccagccttacaaataagaccttgaaatacttctctgttatacaagggctggtaacaaatacactccagtgtctttatggtatttttttggtgttttgttttcctgatgctctgctgtcttcttgaagaatagacgatgcctgcttcaccaatagctgagcactctctgggaagacctggttgttgggtgctgaggagaaggggtgaggcggggtgatgcagctgctccttcaggtgactccttagagcaggggagagtaggccaggggtgtgtggtacacacagcctaaggacacccatgctgttcatcccggcctgggctttccaacccaggagacacttccttctctacagagaaggctcaccgagggataccaagacatacctgaaaaaactcagttccagaattttccagttatgtggccttgggaaagtcagttaggctctctgagcctccatttttctgtaaatggaggtctagcttcctatacgtgtgggttaagttatcactaatgacactaagtgtgttaagtactctgaatgctgactcacacatactccttgagaaaatacaagctgaaaattaaacatgttcaaaataaatgtggataaagtcatagatgacaagctgtgaagaattcccaagagaaaccaggatatttaggcttatgctccctgaaccttccaaggcattaggaagccagagtcttctctttcaaccaatgggaataccataactttaggaaccacacattccttctagtattttacaaataatataaacttgtattagttcaacaaacttctgaatggctacagtacccaaaatactagtgttgtggttcaaagggataatatttttctcagtgctccttgaaggcaggagctagcctataacaaaagaggcgctgtgtaacaaaatccctgcccttgcattctaagaggagatggccagagggtcgggtgagcagagcggtgagcctccaaccctctctgccactccagaatcagtcagcactggaatcaggggtggaacgagacattactcatcttcccccagattactttgctagtaaggcaatagcacacctgctatgatttgaacgtgtcccccctcaaagttcatacattgaaacttcatcaccaatgtgacagtattaagaggcagggcctttaaggggtgattaagttatgtgagcagtgccctcaccaatagcattagggcccctcacagataccatgagtttcatgtgcgtctgtgtgaagagaccaccaaacaggctttgtgtgagcaataaagctgtttttttcacctggctgcaggtgggctgagtccgaaaagagagtcagcaaagggagataggggtggggccgttttataggatttgggaaggtaatggaaaattacagtcaaagggggttgttctctggtgggcaggggcagggggtcacaaggtgctcagtgggggagcttctgagccaggagaaggaaattcacagggttaatcactcagttaaggtggggcaggaacaaatcacaatggtggaacgtcatcagttaaggcgaggcagggccttttcacttcttttgtgattcttcagttacttcaggccatctgggcgtatatgtgcaagtcacaggggatgcgatggcttggcttgggcttagaggcctgacaatgaggacccctataaaagggcttgagggagaggcttcagtcccttctgccagttgaggaaatggcgtttgtcccctcctaaggatgcagcaacaaggcaccatcttagaagcagagagcagccctcaccagacaccaaacctgccaacaccttgattttggatttcccagcctccagaactgtgagaagtaaatttctattgtgtataaattactcagtctcgagaattttcttctagcagcagaaacagaataagacaatacccatgtcttactgagaagagggaaggtgggagaagttactggaagtccctagaatgagggttgaagaccctgaatggtaacaattcccccaaagagccagtgcagccccagagggaaaggatgtcctggtcacactggccagggcgtggaagggcacagtcagcctggctttgaagctcagaaggaaatggaagataacactaagacataacattgacccaaatgaattttggacctgaacagaatgagaagaagaaacaaagaaccaacatcagaaaaagcaagaagatagctgagatgaaaactctacctgaagaccagagaggcagaaaaatgagagaggacagctggaagacaaaaggagtgaaaagaaggtaagagataggaagtatgaagaaacagagtccagaaacaggaaagactacatcaaacagaaggggaagagagaaaaagaaaagagagtttgaggcattcagttcccaaggatgagctggtctctcactgaaaaaagggaccagacacttcaaacaccacacaacatgggactagaatcagcctgcagggccctgagaagtccaggcacaaaaagaacggaaaaagatgagtttacaagttggggatgagattcttcctaaggctggtctagggaagaattaacatacacaatgtataaatagtttaatttttttctaacttttaaaattaacaaaatttattaagggacatagtagtgctttgtgggcacagaaaagtgactcatatttaccaagcattaggcacactattagcattattttccagaatctttaagaacagcctataaagaaacgtattattattcccatttttcaaatgaggaaacagatctggagaatatcttgctcagggtcatagaacaaacaagtggtaaatttgaacccaaacagctttgactgcaaagctttggttctttccactatatcagcaatttaatgagatgttttaaaaatgcttcatcgtgatattggcctcaaaagctggggatggcacctatgcttcctaatgttggaataagcaacatggcagcatagtgtggggagaaaatgctaagcctaggagtcagaccccgattcaacgtacaactttactctttaatcttggacaacagacattaccctttcgagcctcggtttcctcatcaatgaaatggagataataataccaatttgcccctgctagtgctgtttgaagccttcaatgtaataatatatgaaaaatgtaaaatggtatcattatccggtgcaacttagtctgttgaatagtgtcgcactgagattgccttttggtgcctcaatgcaacagtgacaagaggaccagaaatgggaaagctttcaatgagaaacaaactggactcccaaattgctctttgccacccacagaataaataaaccttatgctggaaaagcaggagacacgcaacactgttcttgatgttaacaattcaaaactttttaaaggcagtctgatatttgtggggatacacactattctgtaatcgaatgcaattgtgttttctattcttgtctgagtaaagctgatctttgatttgatttagttcaagtaatatttcaacattgcagtgcagcgttgctccccacccccacctgcttacagcccagctgggcccaggcccttgccctggatggaaatcaaagacctggtttctgagatgcagcctggctttgacaggtctgggaaaactcatggtagtggaaaggtttccaaatataaaattctaaggcctcaaatcaaaacttttgacaagtgcatacatacagaacgtgaattgcaatcacctaaagatttcaaagaatttccattttgatgacataatgttgacacatgtatcaccagatctcccaacaagatgacacactggggttccacaaggacagaaaatatagtctgaggctgtaacctcaactttagcagctgcctgaatgggtgagggggttcagacagaaaatgagaagtggctgtgagtcacaggatgttctttctagatgggccttgggaaacattccatcggtgcctgaagccaggaagtggagtgaatctggcatttctttcagaagccctcttgtctcctttctcatcccagccagcccatgccccatgtcctgtgactttagggaagcttctggctactcagagctgctctctttaggatataacaacaacagagcacgagaaactggaattctggtcctattactgccccttgccagctgtgctttcttaggcaagttacttggcctctctgaacttcggctccttcatgtgtgtatcccctgcattttatgatgattgtaaaaatgcagtgagcttaagaacaagcctggtacctatgctgggccaggcactgtactaagtgcttccccttattcgtccattaatttgccacaatagtcctgagggaggtactattgttattccatttgaggaaactgaggcacagagatgtatggaattatccaaggttacacagctgataagcatcaagccaagatttgaacctaggccatctggctgccaagtctgttctcttaacacgaaggtatatttcccagggaatatttacaagatgttaattttctacccacttccctcaactccctgccacagccaactatcttgccatgtcaccaaagccaccctgctccctggagctcacgtctttttgattttcaaaaatcaaaccagaatcaaaggtccaccccactgagtccttagtactatcagtaaatctgacagccagagaggcatgacccttttccctaagtaaaatccagtataaccctggggactaatttccaaaaagattagtcagagccatatcagaaaggccaaacaggctgggcatggtggctcacacctgtaatcccagcactttgggaggccaacgcacctgaagtcaagagttcaacatggcaaacatggtcaggagttcaaagatggtcaggagttcaaatggccaacatggcaaaaccccgtctctactaaaaaatacaaaaattagccaggcctggtggtaagtgcctgtaatcccagctattcgggaggctgaggcaggaagaattgtttgaacccgggaggcagaggttgcagtgaaccaagatcgtgccgctccactcactccagcctgggcaacagagtaagactccgtctcaaaacaaaaacaaaaacaaacaaacaaacaaaaaaacagagccgggcgcagtggctcatgcctgtaatctcaacactttgggaggctgaggcaggtggatcaacaggtcaggagttcgagaccagcctgaccaacatggtaaaaccccatctctactgaaaatacaaaaattagcagggcagccagccgccccgtccgggagggaggtggggggcagcccccgcccggccagccgccccgtccgggagggaggtgggggccagcccccgcccggccagccaccccgtccgggagggaggtggggggcagcccccgcccggccagccgccccgtccgggaggtggggggcgcctctgcccggccgccccttctgggaagtgaggagcccctctacccggccgccgccccatctgggaggtgtacccagcagctcattgagaatgggccatgatgacaatggcagttttgtcgaatagaaaagggggaaatgtggggaaaagatagagaaatcagattgttgctgtgtctgtgtagaaagaagtagacataggagattccattttgttctgtactaagaaaaattcttctgccttgaaaaaaaataaataaataaaaattaaaaaattagcagggtgttgtggcatgcgcctgtaatcccagcttctcaggaggctgaggcaggagaatcgcttgaatccaggaggcggtggtcgcagtgagccgagatcacaccactacactccatgcactccatcctgggcaacagagtgagactccatctcaaaaaaaaaaaaaaaaaagaaaggcctaacaagccagattcatgccatgaacataagggaagtggcagctgagccactgactccacacaaaagtgcagctgaagggagagagaaactccatactcagtcgggatggcaggctgctgccccggatctctctgccagtcctgtccctttccgccccttgacctcaacaaggtgatatgtcctccaaagggttcatctccagcacagtgacaaaatgcccaaagatatttcttatcttttcctggcaaaatccttataagcttcagagagctccacaaccttaaaaaaaaaaggtatttcagaatcccccaagtcaggagccaaagtaggccagttgcagccctagtcctcactggagaaggcaagataaggaactccaggccatggcagagaaccatgtaggctgtgcactattcaactcaaatcatcacagttctcatggagagtgccattcacagggaccgcggtgtgtatgtacccccagaaacgtgtgacttgtcagccctaggaacagcgtgaaagccatccctacccgttctaggcatattcagcaggtctagaaaatgatctttgcggtcccacaaaacacttactgggcttctagagttaaaaggtactggtgtggccataactttggacagggcaagacacctgcagagctaagatcttgcttgactcagaagttgctgagttccatgtacagtagagagaggctacctggcttccagccacaccatagaatccacagccctgcccacaccacttgggtcatgccagctaaaaaaagatggagaacttccccagatgccccacaagtctaggaattgtttccagaccagcataagcaatggcaaggctgagggactggctatgggggatgtagcagtggacaagagcctcgctaagtgtggaaacggggaacagagggaagctggggaacttctcagaggggatgtgaggacgccctatcccgggaaggcaagaggcttcagctccagcatatgcacttcccaactatgagccaagtaggacgtcccaaccactgcaaggaggtacctgctcaagaggggactgtgtccacagtgcaacctggagttgaatgagagtctgtagtccagatttcagaatatgggagaggagcaggccttgggaccaagtggatgcctgagcggaaatgttcagtaggaagcaggctaatgaacccattaggtatcactaagcaatacattttaagtagctgaaaaggaaatacacagtaaaaataagacagcaaagggtcacctccttctcccacccagtcatgattctcagcagcaacaaccccatcagaaaggccttagcttgggccagtctgcttctcagcccacctaagaatgccagattcaccagagagggggcacagcgatggcaggtggcttggagtggggagtgaggatgactccagggcaaggaaggaagctttggaaggggagcagtgcttcttgccccaccatgccctggcaggagcagatgcaggtgggggcctgaggctgacacaagttggtagggggctctctttttaaaacaagatagtatttttaaaaaatcttacttttgcaaaccttacaaaaacataccactgtgtaaacatattgctaagacccccagagaggaccttgaaaggagctatgaaaaataaagtaaatatttttagcttcccagtaaatctactttaggcctctgggttcatggctgcccttccagaaagctctggggggcaattttgtgaaagaaagaaggccaagactttttgaagaacttctgtcatcattattattcgtaggctctgttgacctgggctaacacaagggaataaactatataatacaattttttaaagcacttttacttgaccctcacaataccctgtgaagtacaggtattttattttctcccaccttcattccacaaagattcactaatggctcaccatgcacccactactgtgctggggcttaggatggaaccatgagcaaggcgcccaccttgccctcaaggggctatagtctagcagacagcccacatccttgggtagtcccaggtgatcccccatccaagtactgaccaagtttctgggctgaagcattttctggttgtttcaccaaagaaagttccaatttcaaggcaaagaaacttaaggcccagagaggccgaacaagtggcaaaggccaaacagtcagccaggaacagaaggggaagcaaagcaactcgaatttattatgtgtcaactgtgggctatgagcttcactatcagtcatccacagacatcatctaatttaatgctcagtgaccctcagggcagctaatcttcaggtaaactctgggccagaaagaatcaacacatgcccaaagttcacacttcatgagggatgcagcatggatttcttcccaaaatgaatcttaatacaaaaccccacactcactcttataccaatgttttccaatcttcaatcatttacaaactactctcacaagttttaccatattcacagaaaatgtttcttttgaattaactttaattatatttttcctgttgaacatcctcctaagcaataatttccatgaaattgcaattggatgtgggttaaaattaaaagttctcatccacgtactgcctaaaatcatcccagataccacacaaaactcacccagagaaacacttatctctgccagtctgtatctcacagagacaaaatacagacatgtcactttccctagggtttctgaggatttatccaatttttacatctgagttgcagtcaccataggtatttaagatgaatgaatgcttctcacactgccttgcaaacattaattaatttagccaccacaccactcaacttgtgtgcctgtactctggtttaggaagaaaataataaaatgtctaaaaagttccagtgatgagaaaagtgggtgaggcaccctgtaagacttcctccttggatttcttattaggatgatttcaaggataattaaaagatttgtccacggcttaattcctgaaatgggagttcttcccagttgaaagattattaaaacagcacaatagagcactgtagaaggagaactgcctggagcagcaggggggtttagccgtgatttattcccagaatatcccttctgtggttgtgtagacttgggacagtcacttcccccttctgggtcagattcttctctagaatagaaattccatatggagaggggccatatttgttttggacacctctgtgtctcggcacttagaacagtgattcgcatataggagacgctcaatatataagggttgaatgacagaatcaactaatttatctataaatgaactaactggtctctaaggtctcttccaataagtggaaataaaatgatgctctagccaaggaaatcatgagagtatttgagtagagatccccatatctacaaatcacctgtgtatagtccagcgaatttagcagatgcaagctgaagggaagaacaagataaacttcccaactggatcacagaagcaggagcccagtggcccagcactgattacaatataggcctgagtggtagtgtctacagaatcaagaatcacttgaacccaggaggcagaggctgcagtgagccaagattgcgccactgcactccagcctggtgacagagcgaggctctgtcttaaaaaaaaaaaagaaagaaaagaaaagaaaaaggaaattagtggtgttttaaggcagtctcctccactaagatcagaaagtctgcttgacaacttacccccatcagccagtctatttcaactgctgcataaattgcaaggcagaagaacaaggccaggtgctcagaaatgcatcactgtcttagaagaatactggctctcatttattgggaatctactatgtgccagatactacattaggttttatagtttacatttcaagttagctgctattttatagttgaggaaaaaagggtctacaggggtggttagtctccactggactgatccaagcttcaagtctttgtcccacagttatcgatgactggaatgaggccaaagagagttgtttatcacatctctagatgacgagaaaggagtatcagatataatacatggcaaaatcagaatctaaaatggttttgggaggataggatagcatagggaatctaaacatgtaaaacagaaaaaagacatttttccctttagttcaaaaagccaacaatacaacaaagaaatggagaacacgtaacttgcaattctgcctatttaaaataatcacaattttgtttgagtgcacatggaatatgagtcaacaaggtgacgtgaatgccaaaatgcctaatacaatctcagactgcattaacggaaatgtagcactcagaacaagggaggcaaaaatcccttcctcctctgtgccagaatactttcataatttccagtaaacttcaagaagcacacagacatactgaaacacaaccagaggagaggcagaaatggggaggaaaaacattccataagaggaaaggaggccattttgcctaaaaaatcatggactttgggaaaacagggaaagaaaaacatgagagctgtcttcgactatttcaaggaaaacagaattagacttgttctctagaaagcataacagggtggtgaatattttctaacaattagagctgtcaacacccagaatgggctacttagtgagtggtagatccccgccctgggaaggtgggtgtgtggtaaaggaggtgaatgaggacaaagctccaaaccagatcagcttcaaggatcctcccagccctgggagagacagcacaggagggccaagctcatcatgctgtgatggggtgtcagtgcagataaacacaggtctctaagtggggatccatactgacatatgccagtctcagcttctctccgaaattgacaagagtgctattcgcaatcagcaaaaagttggccaggtgcagtggctcatgcctgtcatcccagcccttcgggaggctaaggcaggaggatcacttgagcccaggaattcgaggctgcagtgagctcagtgagctctaagggcaccactgcactctagcctgggtaacagaaagagaccctgtctctaaaaaaaaaaaaaactaaaaataaatttaaacaaataaaataagtaaataaaaacaaaatcagtaaaaagttactgatttcctgtaggaaaaggcagtgtttctgtgcatttccccctatactgaagcctgttttgtgctgcaagacaagcaaagaaagaaagaatttaagaaacagctgcaaggcagaaaaggggacatactgcgtgaacagagagatgtaaaacaagcactgacataataatacactcaaaatctaagggaccttctctcctcagagctctgcacactactgtagggtttttagatacagatttggcttcttcaccacttaactcatgtctccagcttctcaaagaaggccaggcatggtggctcatgcctgtaatcccagcactttggaaggcctaggcgggcagatcacgaggttaggagatcgagaccatcctggccaacatggtgaaatctcatctctactaaaaatacaaaaattagttgggcatggtggagcatgcctatagtcccagctactcaggaggctgaggcaggagaatcgcttgaacccaggaggcagaggctgcagtgagccaagactgcgccactgcactccagcctggtgacagagcgaggctctgtcttaaaagaaaagaaaagaaaagaaaaaggaaattagtgttgttttaaggcagtctcctccactaagatcagaaagtctgcttgacaacttacccccatcagccagtctatttcaactgctgcataaattgcaaggcagaagaacaaggccaggtgctcagaaatgcatcactgtcttagaaagaatactggctctcatttattgggaatctactatgtgccagatactacattaggttttatagtttacatttcaagttagctgctattttatagttgaggaaagtaaggctgaggggttaaatggcttggttgagatgtcaccactccaaaaaaaatcataattcatattcactaagtgcttcctatgtgccaaatactgtttttaagcaattacatgttttatctcattaacaggtaagaagaagtggctgaaagggtgctaactaacctattcacaaagtcatgcagccacagggtaatgtatgctagcactttcctctgcaccacgctgtctcttgctacagaggtaaaggaaatatccccagctgtgcctctggtcaatcagcaggggctctccagtaaataaggaaggactgaggctttgatcaggggttgttgctacctttctgtctcctgcaccagaagaaacatccatgtgcaagaccaggacctgcaggtcaaggaaacagcatctcgatggcctggctgcacagccaggagttgtctaagtggacactccaagcacagccatacctctctctgctgtgaagcagcacctcctccatgccacccctaagacagctttgcttccctttgtcatcaggtcccacattgcccattgcctcttttactgcccaaggaaagcacagttctgtagccttaaaaaaaaaaaaaaaaaaaaaaaaaaaaactcaaatctgagtctggtttaaactctagaactttatcatttcttcttttgccaaatagaaaacaaactggtaggcctttcagcaaaggccagccaactccatccctccctaaacaccaaacggaataaaaagcacttccctggagcagtggcagccattggtccatgatggggaggagtaatttatcactgacattgtttagaaccaccggcgcatgataataataaaatgcagaccagcttttatcggcttcattattgcttctacattctctacagaccatgcacatgccattactggctgcactcagccagctgctcccaccagcctctgtccccttgccaggccactgcctggaaggctgctctgatgctatggcagccaatgcctcagtcagaaaatgcccactccccagatacctcctgggtggcacacaagaaattgcctggatacttaccagatcagaggtaaagatttcactttttaaagacaacaagttcaaatgcccatcagactaattgaaatgattaggggaaaatgaattgcattctctttttagaaagaagtgcttaactttcacttatccatatcaacttacaactgtaattgctcttatatgcacagaaatactctgtctataaatccattcactgcaaccatatggccaacttcagaaaaaatgcagttggcagcaatctgcacccctagctgtccctaaggccaagtctgtagtattcttccctggggacttttcttctgtcttcccagagaagattagtacatcactgtctgtggcaaccagctcccctagtttcttcaccaatgcctcctggagaggggccccacaggccagccaccaaggagaaaaaccccttggggaagatctaatgggaacaagccccagacacctgggctactctctttccctggtgcaggtcaatttccaattataaacggatgcagagaaggtttttacttacttgagctggatttcttgatctgctgtaatgttctcagaactttgcgcatgtccttcatgctggtgtctttctggctgtataaaagaagcctccgagcatctgagaacaggcgagccacactgtaaagggtgcaagaaaaggcgaaaggctttagctaggccaactgcctctgctgctttacagaagtgactgccaagtgcatagaactcagcctggctcccaggtcctccacaggctggccctaacccactcccatggctccccacacccagctccattcatcaccatgttccctcccccacccatcatcactgccccaaatgcctttctccattggtctacacacccaaatcttaccacccttcaaggcccggctcatcatgcatgtgcacacacatgcatgcacacacatgcccccagggccaacttatccatgaaccacagtaggctcagtggcctgggcctgggatactcttaagggcatattagaatgttttaatttattttaaaagcagaattaaaagttaatacactaaaaatgtatgaataatcatgaatctggtctggattatattcatctttataccaatgcagtcatgaaatataatttttaatatttgtgtatggaaggggcccatggaggctacaaagccagtctagggtccatgaacatgacagtgtggccctgcgtgccgcagctgcagcttcctcaggattgtcctgagccacatcccatcgtccttactccgtcctaactcacatcacggtcctgtgcatttgaagaatcctcaatgtctcatttgggggacacttattatgcccatacttatgtccaggcactgaagccaggagccaggaatacaaagggaaggggcagcatcctgctttgctcagggagctcacactcaggggagaaagacctgcagacattgtagtctgatggggcagtgacagaggtgagagaggtgacctgatgcagagaagacagaactcccctagccttggctgtcagcttcttatgggcaaggacccttccagcatgcatctttgtgccagcccctaccctctagctcctagagccagcccattcagatgcacgtctgctgcatgatatcattaacaacatatagtatattccaaaatagctagcagacaggacttgaaatgttcacaacatacagaaatgataaatactcgaggtgatggataccccaaataccccaaattctccaaaattctcccttccctcattctgcagactctatcacacaagcatttacaaaaacaacttcacttaaatccagccattcaaaattctccagaggacaagaaaggaaggaaaaggattaactgacaagtttggaaagaaaacctgatctgatacttacatggatttgttaaagtttccaacaactccgggagcctccccaggagtcgggtaacggaaacaggggttgttggcattacagataatcccctgaacccaaggaagtgttcctgcagagggcatggctttatttggaaaatggcctgttgaaatcgaggagtagaaaaacacagggagaaacattaattccctgaagcgattttgaggctccatttatacaatgcttcatgccaagtctgtccgtcccattccccacatcccagagacctgtctcttctgaataaaactgactctcaggtggaaacttggcctcacatgccattcttaatctagtggacatcatctgtagaatggggttcatgataccagcgttggagaagtgatgagaggggtcctaagcagaaagtccctggcatccttagttcctctttgacagccagcctcagctctcagacatagaggggacttggggatgccctaagcctattttttcatactctaaggaggtaactacggtaagatgaagtgggctgggcacagtggctcgcgcctgtaatcccagcactttgggaggccaaggtgggcggatcacctgaggtcaggagttcaagaccaccctggccaacatggcgaaaccctgtctctactaagcatacaaaaattcgatgggcttggtggcaggcgcctgtaatcccaggtactctggaggctgaggcaggagaatcgcttgaactcaggagggggaggttgcagtgagccaagatcgcgccatttcactccagcctgggcgacaagagcgaaactccatttcaaaaaaataaaaataaataaaataagataaagtgactgacaaagaacactcgcaaagtcagctggcgtgactgggagtagaacccccatctccatggtcccaatccaagcctcttcctcacacctgcggttagattggaatttagctcatctcaaacccctctggtactctcctccatctgccaaacatttgtcagtttcacctcctctgccagctacaaagctcctcaagggcacctgaaaaacacacaggcttggggtctgatgtcatctgtgaagcttcgggggttttgttgttattattgttgttttgtcactaattaaaacaatgaggccccatgcactaggtcatcctcttgctctcctctttctttcttacaatgagcttcttaccaaaaggatgatgggacatatttgggcttggtcctaggattcggtctggcacagtttggtttgcggccgtaatacatggatgctgcttatgaggatcaagattaataggccctggacgaggggctcttaacccaaggacctgttcaggtatggacagaaaggccagagctcctgcttctatcatattctcagggctatttgtgaccccaaaagagttcacagttatcaagaaccacagctctaggtggtgaagaacaagtagcttcacaggctttggagtcaaaccaattggaattcacatccagtccctgcagcttgctaagcagtgactttagccaagtcattgaccccataccctcagttttctcatctgtaaaatggtgataaaagtacaattaacttcacagagctgtggtgagcatcgcatgagaccttgcaggcaaagcgtttttgcagagtgcctggtgtaggacaaagactcaacaaatgagcctatgaggattttccaggcactgtgggagtgaatctaccccagcacttactctgctgttgcccagcaggaacactccttccatctcacagctaccacctccctccaaagtgggaaccttgttttattcatctttttattttcatgcaaatgggctgagaagttaatccaaagtcaggacttgctgcactttgcatttcaatatagggtctttctttcttttctatccatactccaaccagagaggcaacacccaaagcaaggatgtgataagatctgatcactgtggccaccctctgcagggactctggcctattgaacatttacacagttaatctccctatcttcctgttaatagttcaaggaaaaccaaacaaggccccttgcctaagtcagctgctcttcattcagggagatttatgtaacccaaccaaatactcaaaggaccaaaagattctcccctttcaatgccaggagacactggcactgtagacagactggcataggtgaaaagcagcacagggcagtgatggtgaaggtatttcaggttatcccttagcaggggtggcaaaggcccttccttgtacgttgtgccccatcctatttgcaaacaaaagtaggatcaggactaggcagtgggtgtacaggaagacaagtaaataatataatgggctctcaggacccagggaagtttttaagaccttgataactctggtttgaactggggaagatttacagagaatttcaaaccagtcctttgttcctagggacaagacacctctccaagtttcaccttaacttttaactctgctcttccaactaggtccctggagggtgatgagaaaagaaggtaaggttgcaagaagtgcatggatatggccgggcatggtggctcatgcctgtaatcccagcactttgggaggctgaggcgggcgaatcacctgaggccaggagttcgagaccagtgtggtcaacatggcaaaaccctgtctctactaaaaatacaaaaattagccggacgtggtggcacatgcctgtagtctcagctatttgggaggctgaggcaggaggctcactggaacctgggaggcagacattgtagtgagcggagattgcactactgcactccagtctgggcaacagagcaagaccatctcaaaacaaacaaacaaagaagtgcatagatgtaaggaaaagtctcatttaccatcagtatatacaagaatttcagaacttttctgaaaatttatgatctggagtcagaggaatctaggttaaaactcaacaatctgcccaagatcacaacctcggtgaagggcagaggcaggatacaaacaaaccccaacttgtctgatgccgaagacatttgctatttccactacaccatcttgcctgcttgtaatcattccagaaaatcattcgtctagtagatgaaaaaactgagtttgcccttgaaacttatacttcagtggtgcttggcataatgcttaaataaaatctaaaatgtatttgctcatcaatcaaaaaaatctctttggggttccaaaagagaaaacagaattatctcacaggcatataaattgcatataaatttcagtttatgcttttttttttttttttttttttgagacagagtctcactctgttgcccaggctggagtgcaatggcgcaatctcggctcactgcaacctcagcctcgcaggttgaagcaattctcctgcctcagcctccccagtagctgggattacaggtgtgcgccaccacgcctggctaatttttgtatttttagtagagacgaggttccaccgtgttggccaggctggtttcaaactcctgacctcaagtgatccacccaccttgacttcccactgtgcctggcccgctcttttcttttttgatgaaatcaggaaatcacgtctcagaaaatgtttcttgaggggtgtgtgtgtgtgtgtgtgtgtgtgtgtgtgtttaatatgactatgtgtgatgtgcattagaaaatcagcaagtaaataactgttgctatatattgtgagaaagatgggaccaggccaagaaacacaattaaaaggtggccctggccccactgctttcctggaagaacagtatctcataagcttgtgggtctcgtaggggtatggactgagctgcttagtggtaggaaaaatcactagggcagtgaaactgaagtcccagctacatttcccagctacgtaaatgttgatcctttagatctggccatttctgcagtgtcaatccacccactgagcccagccctaagagaaagactgtgattgtaagatgatacactgacaataataatatgaggtaggtattactattctctgtttaaaagaaacttaaatcacttgtccaaggtcatatgcttagtgaatgctgacaccagaattcatacccagataacctgacatctggagcctgtgttgttagccactactgtattttctatgctcactgtaaaggctgttatcaaaatacatgattgacagatgatctgagttctattcaaggttgttatgagaataaaataaaataatattagtaaaactgagaagttctacacaaatgctgcttaaaattctgtgttccatgatttgcaatgtgtgattaagacatcatgcatatggaaaagactaggtgttaaggcattatcttaaatgtgcttttaatcaccactttctaaaattatcagtaaggttattctattttcatgatttaaaatgtgtaaaagagatgttgtctactgttataattacaattatcaccattcactaggactgaaaacagtctcctgagttcatgccttatcaacaaattagaagcctaggttttctgatccaaagcatgtgtgatgtttcccaaagacagcatctttggaaaagtccaatttagcccacgttaattgcctggattttccctgccattggtgagtctcaggcaacatccacagttacttacattcatgttgttcatagggtgggtagctcagccgaacagagatcaggatcaggaagataaatagaggccaggccacttccagcagcagctgacactgagtgggaaataagatagaacactgtaaatttaaaaataatatggatatccaatgccactgggatctgggaaatccacagacaacttcatttactaattaatcaacttctccagtctctcccaccactctctaagctttaacagaactgtttggagtcccaaccttttaacataccattccatatacctctgtgtcttcccttaggtaagggaagatgcttcctatcgtgctttatctggttcacttctattcattcttcaggattcatcgtggcataatttcctttactaaaatctcagcctgagctagaagccctcctcctgtgctactccagtaacccaggcacactcctcctgtagcattttcctggagctcctgaaatcatctgtttctgttgctggcttcctcagcacattgagcactctgaaagcaggcacccatctgtctgcattcccagccttagcatagtgccaggtatgtggtgactatgttgagaggagaggaccaggccaacctgctgtgctaaatacacacaacccttgctcctctaattgcacacaaagctgctccctatggggcagagaagagggctctcaaagacaatgaaaattcacacatagttccatattgacctgtgtgcactcaggactgtaaagagagagtgcaaagtccttccccatctgtccaggtctggtcatcatcttctccgatgagttaaaaagatcattgaacttctaaacaagcatgatacactggttaaaacaatgaggtttctccaaaggaaaaccctgcctcagtgagttaccaggcgataaattagcagacggacaagatggaaatcactagacacaatataattgagccagtagtgttcagacaactagttacactgcctgaagtctatcacctctcccattcctttcatttctatattccaacgttgtaatcaagataaacaccaaagagcccaaaagagtcacagggccttgtgtttcagagtaattataacttacaactgtggcttcagagtcacacagccaagataatactggtataaaatccctttttgtcttctttttttaaaaaaagcaaaagattgggctgggcacagtggctcatgcctgtaatcccagcactttgggaggccaaggccggtggatcagctgaggtcaggaattcgagaccagcctggccaacatggtgaaaccctgtctctactgaaaatacaaaaaagtagctgggcatagtggtgggtgcatggaatcccaggtacttgggaggctgaggcaagagaatcgcttgaacccaggaggcagaggttgcggtgagctgagattgtgccactgtactccagctggggcaacagagagagactccgtctcaaaaacaaacaaaaaaaaaaagcaaagatttttttttttgagacagggtcttgctccatcgtccaggcggtacgatccggagatcatagctcactggaacgtcaaactcttgggttcaagtgatcctctcccctagggctcccaaactgctgggattacaggcgtgagccactgcactgagccaaagcagaaattttttcttgatcttcaagtccttatatttttatggaaaatttgaaaataaaaaaatacagaaaagtttaaaaaggtaaatataaatcaccttaatcctacctcccagagacaatccctagtaaactgaagtaacaatggatctctgttaacatcttttgtcttttttcatgcatacataaataatattttttctctacaatattgagactatgcagcatatatacttttgtattctgttttttcatttaacatcatactgggagagcatttcccatgacataaaatataatcttaaaacatgtcctgtaatgtctacttgatattccactctatgaatagatcataattgaacctttctgctaggtgctcgtgcttcagattgttttgggtgtttttatttatttatttatttgttgttttatttctgatatttttaaaaaactgttttttatttccaaagacctttgatatggttctacattaaactcttttaaaaaatctttttggcgatggatgcagtggctcatgcctgtaatcactttgtgaggccaaggcaggcggatcacctgaggtcaggagttggagaccagcctggccaacatggtgaaaccccatctctactaaaaatacaaaattttagtgaaacgctgtgtctactaaaaatacaaaaattagatgggcatgggggtgtatgcctgtaatcccagctacttgggaggccaaggcaagagaatcacttgaacccaggaggctaaggcaggagaatcactcgaacccagaaggcctaggttgcagtgagccgagatcactgcatgatcacgccactgcatgatcagagtgagactgggcagaaggaaatacagcaagataatgacagtggatgtactaggatgataagaacgtaggtgtggctggcgcagtggctcctgcctataatcccagaactttgcgaggccaaggcaggcggatcacctgaggtcaggagtttgagaccagcctggccaacatggtgaaaccccatctctactaaaaatacaaaattagccgggcgtggtggtgcatgcctgtactcccagctacttgggaggctgaggcaggagaatcacttaaacctgggaagcggaggttgctgtgagctgagatcacgccactgcactccggcctgggcgacagagcaagactctgtctcttaaaaaaaaaaaaaaaaaaaaaaaaaaaaaagtgatgtttttaatactttcctgtcttttctaaattttccacaatgagcatgtataaattatctcatggaacaaaaaaacactgttaccataaaactatcaagaatagtttgcatagacggcacaacagaatgaaaaataaaggcaaatggatccctctctggaagaaagcatgctgacagtggagtactcaagaccaaagatggggctggtcttgctaatatttctgtaaataatcccaaagaggcaacatactcaaatttccaagcttgggaatgacattcagccttttctttttttttaatagcaaacacctttttattctgtagcttattttttaagttgagatatacatatatatcacattgcatatcttaaagatatacaatttttatttgtcaattatacctcaataaagctgggggtgggggtggggaagaaagcaattttctttctgccaaagaacaaaaccatgactctatgaaaatgaacttttctcccagctgagccaggactccctcatctcaatttccccaggtactttgtgtctgtatcagcacttggtacaccagggaccctatttatatataagcttctcccttagggtcactttcttcttactaagcctaccacatgataatggctttaaaaatgtttggtgagtaaatgagctggtttaaaagataatgaacacggaaatataaatcagttgagccctttgggaaagcaatgttaacaatacgtattcaagagtcatgtttatcccatttgcccaattactattcctggaaattcatcctaggaaactgaacttaagatatcaaaaagctatatgcataaagttattcattcattgaaacattataattgcaaaatattggaaacaacttaattgcatagcaatagggaaatgattcaattatggtacatgtactcaacaatatatcatgccatcatcagaataatgtttatgaaacacagaaatcattagccatgtaatattaagtgaaaaaagcagaatacaaaattatatgccattccaagcttgtagctgaataaaatcacttataaatattaacaaagacaggaatacaactttccttttaaatggcatgactgtaaataaatttagaaaatacttatgaggccgggcgtggtggctcacacctgtaatcccagcactttgggaggctgaggtgggttgatcatgaggtcaggagttcaagaccagcctggtcaaaagggtgaaaccccatctctactgaaaatacaaaaaaatagctgggcatggtggcgggagcctgtaatcccagctactcgggaggctgaggcaggagaactgtttgaacccaggagacagaggttggggtgagccaagatcgctccattgcactccagcctgggcaacagagtgagacttcacctcaaaaaaaaaaaaaaaaaaaaaaaaaaaaaaagaaaagaaaatactaatgaaattaggggaaaaaaatgaagctaaacaaagagtatgagtaagataaatagccatcagccttgaagctctgaaactaccatttgtactttaaggataaatagtagctactgtttatttagggcccaatatgtacaaggcacattttatattaattacttaatttaatcctcaggacaaccctgtgagataggaaacattattgtcttgattttatatgtagcaaggctaaggctggaggaagggtaaatcacagagatagtcagtagcggggttgagatgagcagccaattctacccaactcaggaggccacatgacattctatttgacaccacgggtgactcaggtaggaaatggccccactaggtggaatggtctagaaatatcaacaggatccagagaggtaaaattaattcacagcttgtagatttataatacttacagccaatattgggcagctactgtgtactcaagacgttttgtgtatctcatctccagtatttaattcataataaccctgtgaggtaggttgtatcattaccgttttagaagtgaagaaactgaggtttgaacaagttacgagccataagaaactgcaccaatgtttgaacccagatctactgacacttaagtgtgtgcttttgtacccatcatgctgccatcacaaagctatgtttaggacatataccttttaagatatgccacttaaaagaaacctagcacttgccagccctgctgagcactgatctgacccaattaatcaaggcttatgttcctggatatctctgcagcccccatatctaggatcctgtagggcagcagatgctcaaaatatgttggttgactgaaaaaaatgaatggatcttccccatggcaactgacagcaaagggcaaacaaaaaatcttacaagccatttggagcagctgaagctggtgagtgtaagcagatcaggaaaagaggttaaaaaaaattgatgatgataataataatgaaaggtcttactatgtaccagggttgtgagtgctttatacacattaactcatttaatcatcaaacaatccaattagtactcttgttatacacattttacagaagaggaagctgagattcaaagagttaatacactgcccaatggtccaagattggcaaatggcagagccaagattcaaagccactctgactgaagggctccttctcttcgccattatggaccccaacctccttatgcactttgccttcacttaccagagcatacagacacctgctctctcaaagcccttgctgagctgggagactagcatgtatgagtgaattaaagagactgtctgcaaagttcacaccacctgagccagagaactcatgagagacaaaatttaatctttgcccttttatcttggacctctaaaattcttcccatcattgaacctagaactcaccttccaaacccaggggaatgttccaggtatttcttttcataatagcctccctctagaaaccaaagttgacttctgccaggatatgccattatggctacactcattaataaaatcagatttctcctccttctctaagcttagcacttttcctaaacataaaccctcataaatagcttggaaatgaagttgatcctttaccattataaattcctacagaaaactcttctaaatcttgctttggtgcctacccacccaaccccacacctccccatggggtgggaagatgggaagaaacattgtttttaaaaggcgtttctcaccaaagtcaaagctgctccaagagtaccgaagcaccactttgcacttcccatcttgctatttcaacatggggataatatgagcaggcactgctagagcagattttcttgatagtgaccctactgacatttggggccagataggtgttgtgagagactctcctatgaattctacgaagttcagcagcatccctgacctcaacctctaaatatcagcacatacattcccaggattgtgacaaccaaaaatatctccagatgttatgtccctggtggaagggtgagggtggggtggggtagggggataaccggccccggtcgagaaccactgctctagagttattatgagaattaaatgtatttcacatagaaggcttagcacagagtctagtacttatcatcatgttattcaatatgcatcaaaccactcttgaatcatcattcatagttatgccaacatctcccacactacagatgttcactgtccacttgattattcatgcctgacttttgctgctggctgccgaagttcatagaccacaatccagtcactctgtgaacccatttccctccctagcctgaggacacagtcacggtgctcttaaattcttgagatttagccacgttaattcaaggttagggcagcgcaagggccatgtacaaagaacagagaaaactagcagaataaaattgggccttaggcaagaggcttctgaatcatggtagccaaaataatgcactccgcgctgaaaaatgaagtcgctatttcttagtattgagagattcttgagaatataatgggggataaaaaaaggaaacaagaagaataaacatcagaaaggaagagatgaaaatatcctttctgtttctggcatggtcgtaaatctaagagaactcacaaagttaactaaaaagctgcaaatgatttgcaagtatgggtaagttaatcagaaccaaggtaaattctcctaaataatagcattgctattagtctctgaaaaccagttaaattaatataatgtggggaaaagagaatactatccacagtgagaatggacacataaacaaaaaaacctaggcattaacttagccaaacatgtgcttcttacataaaagaaaaccacagaactgtagtaggataaataaaggaagatgagaattaaggagagctaaactctgcttcttcatgagttcatttaatatccaaatttcccaagctaatttatagatttaacacaactgaacttaaaatagcgatagggtacttttttgagcttgataaggtaataacattcaatggggaaaaaacagataaaaatatcaaaagatattctgagaggcaaaaaggtaagtgggggacaatgagctcccccatatatcagaatgttcatcaaattcagggtacattctgggctctatcagcaccaaaactaaaactacatatcaaatgaccaaatgaataactccaaaattgctccctacacatctttttttttttttttttttttttttttttttttttttcagacagagtttcactctgttgcccaggctggagtacagtagtatggtcatagctcactgcagccttgaccacctggactcaagcaattctcctacctcagccttccaagtagctgggactccaggcaagtaccaccatgcctgactaatttccttatttttatagagatggagtcttgctatgctgcccaggctggtgttgaactcctagtctcaagcaatccccccacctcagcctcccaaagtgctgggaatacaggcatgagccaccatatccaggttttaataaatgtcccaaaaataactagaaaaggaatcactatttaatcaagtgattatttattaaataatcactgggatgacatgatatgaatgtgaagaaaaattaattttagacccatccctaacagcatacatgccaatgagacctgggaaaactaaagtgaaatcttaaggatcacatcagaaaaatgctagagaggggaaatgatttttaaaaccaggcctgccttccctgaactacaaagtctcatgcattgatggtggctatttaaattggttggatcctctggaaagacatctgatcagacacttcaagggccatttcccttcaacctagtaatcctgttcctcagattttggcctacagaaataatacaaaaataataaaagattaaatgtatagaatctttatagtaatttatttgtaacagcacacatggaacaatctaaatgttggcaacagggtttgaacttataaaaactgtgttaatggattactgcacagctatcaggaatgtcaaaggcatcatcccacagtagatttggagccaaaagatcccagccctcctcttagcaactttttattttttgagacagagtctcgctctgtcacccaggcaggagtacagtggtgcaatcttggctcactgcaacttccacctgccaggttcaagcaaattctcctgcctcaccctcccaaatagctgggattacaggcaagtgctaccacgcctggctaatttttgtatttttagtagagatgggtgtcaccacattgaccaggctggtctcaaattcctggcctcaagtgatccgcccaccttggtctcccaaagtgctggaattataggtgtgagccaccatgcccggccattaacttattaacaatactctcttcatctgtgaaacagaaattgcaacgcatacacctcagaattgctgtgagaatcaagaaagtaatggatatcaaagtattactttcaaaactataaaacacagcctacacatcagaaatcattattctaaatcagaagatgatttagaaatatgtgaacacgcacactaaataatgttaaatgaaagaagaaaacagcataaaatggtccatgtatatgtaatgattacaattgctttcttgggcctttgtcattcaagttccctctatcccaagagtcaccagacaatgtggcctgactacctcagggaatcctcttgcacataaaataaaattaaattctcagggggcactgtgggtcacgcctgtaatcccagcactttgggaagccgaggtaggaggatcacaaggtcaggagtttcagaccagcctggccaatatggtgaaaccgcatctctataaaaatacaaaaattagctgggcatggtggtgggcgtctgtaatcccagctactaggaggctgaggcaggagaatcgcttgaaaccaggaggcaaaagttgcagtgagccgagattgctccactgcactccagcctgggcgacagaactagactccgtcttgaaaaataaataaataaataaataaataaataaataaataaataaataaatattaaattaaattctccttccccaggagaattggccctaaatgatctggtcatgtctactaccaactcatcccccgccagtcttattcactccaccagtgccactggctttcttctgttccctgacctaggggacaggcacccccagtctctctgcctggaatggatttccctatctctaagcctctgatctttgcctggctaaccattgcttgaacttcagggctctcagctttaatgtgacaacctgtcaatctaaatgaaatccctacccacacctgctagtatctaacaccagtaccatagtttgccggattttttccttcataatcctcatcacagttgatagttatatttttatttgtgtgatgatatgtttcacatctgctggcctcactgaactgtaagctctacgaaagcagtactcatgcccagctgcttcaccactatatacccagctaaccataccacaagtaatagatgcttaatagatatttatccaaatgaaacaataaatgtctatttgttttaactttcttcattccgtagaagagaaaactaaagctctggagaaaggagttttcctaggccactgaggcagatggtggccaagctgggattggaatcatgaccactgctgccggcccaggagtaaggacagggaagaaatgtgtcaggtgaaactagaagtggggaaaggatgcagagagtttccatctactctgtaaaattctctaaaagctcataaatgaggagttttaatttttggatagttcattctttttcattaaagaatgcccaaatagtggtactctggctgggtgcagtggctcatgcctgtaatcccagcagattggaaggctgaggtgggtggatcacttgaggtcaggagttcaagaccagcctggccaacatgctaaaaccatgtctctactaaaaatacaaaaattagccaggcgtggtgctgtgtgcccataatcccagctacccgggaggctgaggcatgacaattgcttgatcccgggaggcagaggttgcggcgagctgagatcataccactgcactccagcctgggcaatagagtgagactcagtttaaaaaaaaaaaaatcacaattaactattttcccagccacatgactagtcagatctatttgagaaaattaataataaaggcaaaagaaaagaggccatgtggccaccctcactttgtccagtttgttccatggggaccttggcctctggatcagcctaaaaccagatgaggatcgtgaaagctctgaagttctcttccccttcctgtccccagccctgtttgtactgaatacctgccacccacacaagttaactgttactttggacccaaactgagctttgcacccaactttcacaactcaattcaatttattctttgcctaacagaaacagcggaaaactaaccctggctgatggtcccccctcagtctgcacaatgggggtacaggagaggcaggggacccaggagttaccagcaaaccaggacacagaatgaaaaggcaagcactgcctttcaacagggttgctctggggtataccattcagctccaggctgaacatagcgtttctagtcttcctggcggcagcacacaggctttatgtatgctttctattcttcctagtgcaagggagcctcctcaagacctgcaaactaatgggccttaagacatttcccactcattcagtaaatacttactaagcatgtcccaagggccaggctctgtgctgggctctgaggccaagcgtatacactccaggatctcaggagacaggaactgtgcaatgaacatccatacgctgcaggcaacagctatcatggactgctaacttcttcccctacctaatgggcagggctggttctcactatgtgagctaacaagtggccccaaaacccttaagaggttctgacgtctaaacaatataatctagaaatctaagccaggtggattggaaagtagctaccagtcagaacttgagattcagagacatagaagctttagtatacacagagagcaaagcaaaaaagggtctgcaactgtagggccaccaggagactggttctggtgctactttcctgactgaccaactctgggcacctgtgcccccctgagccccagttctgtcagctgtacaagatgcaagccagatctttccaactctaacaatctaagcatcagcaacctgaaataaatcacttttctttctgattcagcaaaatatacttcctttagaaatcaggaagagagttaaggaaaacaggttagcaggcagtggtataacaacttaagcccctttgtgtcagggtgttgcatcccacttccttctttaaaaagaactctgccacaaggctacaaactgcctttggctaaacctgcctatctctctaatcctaacacttttaaacccatctgcaataccaagcaagaagcaacaagaccagtggagtctggcccaatttgaatgacccaaccccacatcctgttgcaggattccttccctggctaagcacggaaaaccttttccctgccctttcttctaacttcaagctgctaagcagctgcaaaaaaataaaaaataaaaatagtttggaggagggaagaaaagtcactgtgatgggacagaatgaggctcggccctagtcctggggatctcagcttctggttgcagctcagttgctggctgggtgacctcaagaaatcccttccctgctttgtacctcagctttctcatccgtaaaataagaggttcagactagactaccccagagccatagcccccctttcattgccaacatgatatgattcttcccactactcactaatggacacacaacatggataaaccatggcggagacaatttcccagcaagtgggccccctctaccaggataagaaggggcaggagccctggatcacactgtagcaaaggaataagagtaaggacggacatagaggactggaacaccaagacctggggataaccacgggaggcagggagaaaggcaaggaaggagtcagaaacttcaatattctcagatggagaataggcaaaataatgacaccactgaaaagcgattaggcacattgagttagagtgccagctccaaagtcagattatctggatttgaaccctacctgtgctccttgttagtggtgtggacctcagacaagttacttaacctctctgagtagcacgttccccagctacaacatgtggaaataacagtacatcgcggggccttaaaaggaataaatctagttaataatgcctaatcagttagtgcctcacacatggaagctcattctaagtgtttgcttttattttattaatataatattatctattatactttacaattattattaaaacagataggatccacagattccagtccctgttctctcactagagacctcagaattcaggttccccatttgtaacatgagaggctgaacacaatcagtttttctcaaaggaagatctgtatacatattgctgagggattatatttaagttctctaagaggattttaaacactttgttttcatttcaacagtcatctaaacaaagtctaataaacacatatggattttttaaatgcttactttaaagccaagttctggcacaagatttcaaagcccaagtttatatttgtgtttatgattgtgttggcaccagtataattgtagcaaactcatgaggatggaacaggtgccatcaaattaaggtcatacaagtagaaaaatgggtggagaattcaatcattagcacatgataatatagactggccaaactcaaaatgatcagcatgatagcatttactgccatgcaacttataatttggtttcagttgaacaacagctgcctcaccacatttaaggtattaatttgaatggtattgattttgcaattttggctgcacttaatttgtaaatatgtatgggtcatatagttgtataataacagcctataagaagtttatacctacttttacttcctaatatttaagtaacactataataaaaaaggaaatttagtgaacaaaaggatgctttgacacttttgttcttttacagacagtgcaagcattattctagtttgaggaaaactgaatgaaattctctccaaagtcccttatagccctttgaatctcagaaagatgatcattttgattacagacatgttaagctacattaagacagccaagtggggatactggcttagaatccaggaaaaaaaaataaaggcagaacaggaacaagagacttagaaactaactacagagaaatgcatcctagagatgggatctctaaggaagggtgttcagagatagagagacaaagagctgacgtctgagtttcagggagttcactctgctctacagccctcacatccctctgtggaagagttccattcacctgcgcattaaagatgatctccagattactcaaagcattattggcccatctgggaagtgaatggcttagaaccctctgcagaaataaaacaagtctcagttattatattcctccaggcctgaaggaaagaatccagattgacaccaagatacccagtattgatctctaagagtggggccactaactcacttcacccacagcttccagaaatacaggggcccattaggggcttttggagagccaggtggctcccagggctgcagcaaaaggaaaaagtggggtgctcaggggcgattcggagccaggtcctagggatcagaactcatgcctgggcagtagcacaaaccaaagctactatttctacctggctgcaaatctgccctctatgataagccacatgccatatccggaccacacagtcctgtgtccataagagccagattccatcaatccctgtgtgaaaaccaacacagcttccttccctccctccctcctccaatccccaactcaaaaccacaaagaaaaaatgagagaaccccccgctgctgaaaaacccaagcttactgtttgtcttcttctgaaagtgaggttcttccacagcagcaacctcagctgaggccaacaagccatgttccctcagccagcacccccagcgtgtggctcgggagccctggaaggcagcggccagagctcacagcagggacgccgtggctggtcattaactgaaagataaagcaggaggggaaacagccatcagttattgctgcaaagccatacaccaatgaggactgctaatccagccctctcagctgagacctccaacacacagctctgcatcatgactgcttctcaatggatcatgagtcaccagctcccagcctctgggttcacccacaaagagggactcgggaggtgttccgacagcaggctaggagctacgtgttatggtcctaatcattttagttctatagatgttatcatctgggaatgaagaatgcatttctgaaaatagacctctctcaggtggccaaaaacactgaggatggaaatggcatactggaatcccagagacctacctctcttttctaagaaaatgcctccccttacatacaaagtcagcagcatttgtaaattttgcctcaagcctggagtgacttatactattccctgaacttccttacatactaattttcagtgggttatacaactgagtccttcaaatgataaaaagcaccatcggccaggcgtggtggctcaagcctataatcccagcactttgggaggccgaggcaggcggatcacgaggtcaagaaatcgagaccatcctagccaatacggtgaaaccccgtctctactaaaaatacaaaaattagctgggcatggtggcaggcacctgtagtcccagctacttgggaggctgaggcaggagaatcgctgaacctggcaggcggaggtgcagtgagccaagattgtgccactacactccagcatggcgacagagcgagactctgtctcaaaaaaaaaaaaaaaaagcaccatcaataaagcagtttcctaatctggaaaaccacaacgtgccttagatgagtgtgagtaaacaccaagaaaatgctaccgacacctggctctcaggtaatgaggacaaccctagcgctgtgtctctggaaagaaaacagcatcccatggagaaacaagtctgctatggcaggctcagggcatcaactgtgaaaccgacaaacaagctcccatggtcagcacatatgcacacttctggccttgttccacctgcacctgaacacaccgcccccctactccgttgggtgtcacaggtgcctccttggaggactgtttgccatgctagggcaagaaggtcttctcgtgaacaagggatactacattctgtgtatcccagccacccatccagcagttacccttatttaatgctggaatagtcccaagtagttatattaaagttaaagctggggagggggcagaagatgaaaaatggaagggaggacacacaggtgaaaattcggccctgctggcacttggtagccatgaactctcctagctgtgcttatgaaatggctcagtgaatcactgtggcctctagaggagtaggggcaagggtagggtgggacactgggcatgaggaacaaggagcagaaggaactaagaatgcagtagcgaggtatggatacaaaaccaagcgctagactagaaatctgtgagtccaaatgagatctccatgccaaggtcagtctctagtagaacaatacccttttatctaccacccaacaaggacttggattaaaacttctagaaaagtcaagagattggaggaaattgcagtgtctgagaagaaaagacagcctaccactatgtattccaattcattcattgacagtccaataaatcaagaaattctctgaaatagtcaagccttaggacctatttcttttccttaccatttgctcagcaaacttctagaaggacacaggcctccaaagtttcttactccaaaaagaggaagagttaaaccagcactgcatcagtttgttcaaagatgacaactggcagcacagcactggcaaccagagcagcattgtgagacacatgcttgtcatcccaaattgttttctaagtggctcaggacagagcttgcattccagagacactgaaataaataattagctagatttttctcatacagaagctgctctccaggaatcagttcgttgatttagaagctacatgaatctcttgaaatccccaaggtaacaatgaggaggggacaattaaaaaaggaaaactatcagaaagagcccaggcatgaattagccccggcttcccaactatgtgcccctggccaaggctttatgctctctaagcatcaatttcctcatggtaaaataaggatgacaatacttaccttgtatggtgttcaactgtgttctactgtggattcaacgagataatataaataatttcccaacacagtacatggcttaatttaagtgccaaagcaatgtgagttcccttctccccatttatctttcttcattccaacaatatcctctagctgagaaatggttatatcctgtccaaacaggacgttccattatttctagcaaatccattgtgggtttctggaaagataggaggggcaaagcagtaaggatgaaatcttaatagcctagtgttgcagtacccagagccaaacccaaatatagaatatcacctcccctaaaccctgagtggaaaagctcaaaggaagagaagacacacctctacacaacgttcatgagaagaagggaaggatgagttttcttggacagcattttcttggaagtaaagtgtctgggtttcaagaaaaaggttctgactccaaggactctccaggaagcacatggagaaggttgctaagaagtagcatagagccacagtagaaagttctaccgtggctttgctgggcacacttaggcaagcttcctgctccaattcctcccacccaccttggcactgacctggcctcctgcacaatttgctcccccaactcagaacacaatgatcaatactgggagcaattctgtcctaagaggagagtttggcaatgcccggccccttctgctcaggtaactgaagccaaagggacatttccacatcagttttccaagttagtgaacaaacaaaccaaaatcaaaaaaaaaaaaaaaaaagatataaaagagacagtactatgtactagatttctcaatgtttcaaatgcagtacactcacttctgccctcatacacatttccagttactggctggaaaggatcccacttcacagtcatcccagtcaataggccactctgatcctgctcctagatgaccgcaactgccacctcactggtctcccaaccatttgtcacagagcacccaaagttactcagctagaccaaatatctgaacatgcctctccccgacttaaaaccttttgccagctcctcagcacctgaacatagagtccagtgctcaccaaggtctacctggcctcccttctgtgactccagcctactctcttgccactccccacctgctaagcaatgccctggagatgtgtatacaggctcagaatatgctgcacgctctcctaccactgggacttcactggtgagttctcttgtcctaagacactttttcaagcactgctagcctggctaatgcctaggtctcaaacttaggtctccacttcttcaatgtcctttcctgatatcctcccctgcaactgacacgtgggttcagagcccttcctacgtgctccctaggaagacttggctgggaaagaggatttctaccttctgagtcagagcagagaccatttctgtttccttcatccctgttttccttagtatgcaaaagggtcctggcttgtcgtaagcacttggggatgtctgcttaattaattaagagacggataggagaaatagggtgtcagaattcaagggtggcagcactcctggacctgtggtaactcatttctcaagcctgattaaatgatttgggcaaattatccccaaagagggagctctgtgttcagcagcttctaccatatgcttgaaagtcacaaaggactgctgagcttcccaggtgactcctgggacatcctgaaaaacgtaatagaatctaagtctgtttcccataactgccagctttagctaaggactgggcagcctcccaaggccagcagggccatgcagtcgacttcccgcccgtcctcaccctcaagcccgaggcgtacgctctctgggtctcatcagtcacccaagtggatcactccttgccaaaatgtgacaatctccacacctcagccttgtttcatacagtttgggcatggcagaagtgactgctggaaacctttggccaattttttaaggaaattttaactgcaaatgccactgatattttgaagttattaatatctacagaatacaacagactgctaaattaaaaccttcccaaataagcagaaacactcatcattagctgcagagaaatgcaaattaaaaccacaatgagatatcattacatacccactaaattaaatattaaaagtgctagcatgtgtatggagacactgggactcaatacactgtggaattgtaaaatggaagagccactttggaaaatagtttgacagtttctgctaaggttatacagtactattatatgacccagtcatcccatcctaggtatttgtgaatatttatagaagccttatacagaatagccaaaaactggaaacaattagttgtcgaaaagaccatcaactggtgaataaataaaactggggctgggcacagtggctcatgcctgtaatcctagcactttgggagccagaggtgggcggatcacctgaggtcaagagtttgagatcagcctggccaacatggtgaaaccccatctctactaaaaatataaaaattagttgggcgtggcggtgggtgcctgtaatcccagctactcaggaggcaggagaattgcttgaacctgggaggcggaggttgcagtgagctgagatcgcgctaccgcactccagcctgggtgacagagtgagacacctcctcataaataaatatataaataaaactgggacacttactcagccataaaaaggaataagctactgttacatgcgacaacctggatgaatcccaaaagcctaatgctaagaaaaataagccagacacaaaaaactacatactgcatgattccatttatatgacattctggaaaaggtgaaatgaaggggacagaaatcactgcagtggtgaccagtggtcatgggtggaggggacgacagactgaaaaggagcatggcagtggtagatacacatgtgtatccatttgtcaaaactcatcatacttttgtaaaggggaagtcttactgtggtaaattacacatcaataaatctgaaccaaataaactgccttctattatcataattaacatacctcacaagtcataacttggaagacctaagaactggatagtgtaaagcctgattattgtgtgatcgccttggaagaggaatagtagataaatattcattaccacttataaattccacaaacaactgcagccttaactctgcaaggtgcccatgagccacaacaaatatttatcgagtgcctatcacatgccaggtgtgttccataccttagagattcagtggtgaacaacagaagcaaagttccttcattcatggggctcctattctaccagggatgggaaacagacaaataatagtgggttgttcaaacagtgggtggtggtggtaggattgacgaagaaaaataaagcagagtaaggggacagagagtaacggggtggaagttattcctttctgatgaagcatctttaggacaatgaactgagagagtggaccatatgctacccacaaaggggtggcttaaatgacagctgggattataaaattacttttacttttccctaaaccaaaacctggaataccagacagcagacagattcagtgatgctggcaaaagaaatacacacacacacacacacacacacacacacacacacacacacacacattcacaggaagctggctgtgaagggggaaatgatgaccctagttagcacctggcacgtgttctcccacctcttcctcaccaaaacattgtgcccttttgaacttgacatgcacatttccaggagagatgagagatgagaattataaagaagaagaaaaggggagagaggatgacactaaaaagacaagataggaggatttttccccatttggcatagccaaaagaaaaacaggaactccttcccgtgactgccctctactcttctacagcactaaatctgtctatggaaacacagtgaggaaagaaagtgcatgtatctgtacagctaccagaagctgtttgcttgtgcagtaacaaatgggctggctggtctttttccttcccgcaagaacactgccaacacatgagctttagtgctgggctcctatcgaagggtgacagtcagccctcatgcctgagccagggcaggttccagaagagggaagtctccaagcagggatcatacaagtgtcaacatctcactgggacagagaaattggcccctctgggtggaagaggagaggcttccacaaagtcatgctccatttgactgtcgtattagtagataaaatctcttggaatgttgaagactcattcccactacacccctgctgcaatcttatagacagagaagctgaggcctcccccaaagcaagtgacttgcctagcattagagctggtttctcaagaaataactttttcaacaactcttatatgccccttcccacttagctatttctcctatgattttgtttgttgttctgaatgcatttctcagagttctatccaaatagttcacatacccaaaatgtacagatagcaactaattctcctctttcaaaaacagtgattatatgacagctatttcattaaaccttaaacaaacaagagagtatgtgtgtgtgtgtatgtgcgtgtattccactttgttcaacaaacttccaaaaagttaccagaagtgagatggaagttgaaatttccaacaacagctatcaatatctctcttttttattactttattttattttttagatgtaatctcactctggtgcccaggttggagtgcagtggtgtgatctcagctcactgcaacctctgcctcccaggttcaagtgattctcctgcctcagcctccggagtagctgggattacaggtgcccaccaccaagcccagctaacttttttgtatttttaatagagacagggtttcaacatgttggccaggctggtttcaaactcttgacctcaagtgatctacctgcctcagcctcccaaagtaatgggattgcaagtgtgagctaccatgcccggcctcagtatctctcttgatgaggttgcttctagatgtctttttcgtaattgaggtataatagacaaataaaaatgttatatatttacagtgttctagatgtcttatatcaaaaacagcttgccagtaaactacaaagcaggaggtggatttaactacatcagatatgaactgaaaatacattggtgccaaagctctgattgcctattcatgagatgttgacacaaaagcaagaatcacagatatgactcatgtgcctcatctccagagagatgcacagggtcctataatattaggacatgaaacttctaagcccaacagaacatgcttgctttggaaaaggtctgttctctaattgcctctctgatcatgtgtctttggatcggtagccacgttcagggacaagcctaacaaggttactgaaggccaagacacctggaaagaacaggttcactgcacccatgattaaagacagacagatcgtggctgctgtgggggtgggaggggatattgagagtcatcctgcaatttctcccaggctgacccatcagcttaattgagcctgaagctaatctgactgcctcagtttaacttttctggcctccagatgctactgggccctctatccttaagggtatccttgctaggacagccttaaattatacctcctcacactcctgaaacattccataaaccacagttccagggaaactaccttgagttagggggccttgcagaagggtcatgggctggtactcccccctgaaactgtgttcctatttttaaaggcaacattttaatagtcaaatttgagaagccaaaaggggtaagaaatcctccaaggtaaaagtcaaggatgaaatgaagttatccaatcattccagaggaattctatcattctataagaggttctgctatcacactgtccgtttaaaaatatatagatccagtgaattttattaattccaataatctgtaacttgggtgcagtttttaaagtaccaaatgcatcacacttacttgattgttagttacaataagataataggtaactgtacttccttctttcacttgaatacacatccaatttcctagacaaaattattgctaatagctaattttcaaaataagggctatgaatttgtaaaaactgaaacaagaaatctatgaatattgtacaaatctataactagcttttgagaagcataattcttcatgttgtcaacaatataattttacaggagatcctgaccgggtgtggcggctcatgcctgtaatcctaacaccttgggaggctgaggcagcaggatcgcttgagcccaggagtttgaggctgcagtgagttatgatcatgccaccatactccaacctgggctacagtgcaagaccctgtctcaaaaataaacaaacaaataaataaggagatcctaaaggtttaactccatctatatcatgtcactgatacttggacaaccaaagatcctatttatcaccctcaacattcccgttgccaccagctaaatggtctcagggcttctaaacctcacaagagccaggatttctgaaagcagatctgtcctgtaccccaagtccttgtttcatcactatagaactacgaagaaactctaacaaaatgttagagatagcctctcttcccctgctgatttccactaagcaaacaccaagcaaccttcaaaggaagacttcagcaaacaataccactatttgccttttccctggtcggggggtatgtagcacatagaaaaaaagaatctttcctctagaaaagaaatcaacctttcaacattctatgtcatagaaaaaaaatcaatttttttcagtcacaatcataacaccagaataaaagggatctgaagggaagggattagtgaattcataaacaccctgagctacagaaacacaagcaggcaagcctctatcagcaaccctttatttgcagaaaaacttggctggataatgttccctgctgttataggacggttttccaagagaattttgggataaatggtttagtgaccatatcaccaaagatcactttgtttggattacatctctgaagaatcagtgtcttcagatgttcaaccttctcccaacctgaaggatttatatttatgaaagtgctcaaagcatttggtggggcagacaaacccaaatcttagtcactgtctttctttcttttcctttgggtctattctaccatgcagaaaactccccaaatccttaactcctttgttgtcttgagttaattgtttcagcaggaagaaaggaggttttagagtcagagaaagctgggtttgaatcctgactctgctactcaccagctctggaaccctagggactctgagcccctgtatcttctccaaaaaatagaactgataatgtatgtaaaacatttatccagttcctggaacaaagtaagtgtacagtagctattaccatgattaattctggcaatttcacagtgaagtattcatcaagggtgggacacagagtgggtggtttattaaaggaatctcttttctgtattctttgtccacagaaagggcctttccagagcaaactggagcgctctccagtacccagtgcattggtagaggtgaaagcattatacggtatcctgttgccacttctgaccattgttttactataaaaccccctcttgggggtcctcaccactcacttatactattttctctacattctcacagaggttgcacctatcctccatagcacactgccacctccctacaagtttttattttattttatttatttatctatttatttatttagatggagtctggctctgtcgcccaggctggagtgcagtggcgcgatctcggctcactgcaagctccgcctcccggcttcacgccattctcctgcctcagcctcccgagtagctgggactaccgacagccgcctgccaacacgcccggctaattttttgtatttttagtagagacggggtttcgccgtgttagccaggatggtctcgatctcctgacctcgtgatccacccgcctcagcctcccaaagtgctgggattacaggcgtgagccaccgcacccggccccctacaagtttttggcacctgactcagttttcctgtccatcccatttcctccagcctctatgtccattagaaatctctattagaaatctgagccttggccagacgcagtggctcatgcctgtaatccctgcactttgggaggctgaggcaggtgatcacctgaggtcagaagttcgagaccagcctggtcaacatgataaaaccccatctccactaaaaatacaaaaaagtagctgggcatggtagtgggtgcctgtaatctcagctactcaggaggctgagccaggaaaccatcaagtgagaccatcaagtctcacttgaacccgggaggcagaggttgcagtgagccgagatcatgccattgaattccagcctggacaacaagagtgaaactccatcttaaaaaaaaaaaaaaagagagaaatctgagccttataattcctccatcttttcagctctacctacaatcttctctagtgtactaactcatcagtgatccctgataaattaagcaatgtgcaacaagctactgtgtctcaccatcttcctactctccactacactgaacccacaatgacgcagcgctccacaatcacatgtagaatggaagtaaaacctcagcgataagaaaagatagttaaagcagattcactacagtaacaaaccagtcaagaaatgtcactgaaagtaaaggtttgtgtgacaaaatttccagctgtgttctaagaaacataagttcaagcaggagtgcatttaatctgatttttcctcaaagcctctctaatttgtagggaagcacattcattttcattaacttcatgtgagctagagagaatctgtgattgaggctctagaacccctggtaaacatgccatcaagcaagggcaccttccccggaggttcaacctagagtataagattgtcagcactggtaaagagccttgaactctaaacccatagataggctcaagtcaggaactcagggagcctataaacacctggatacaattttgccaccttaacacttttattccctttacttgcgccaaactgagttatccaatctccaggctcttgtccagttctagttcatacagtatcggcagccttctccagaacgtcctttcaccagccagctcttgagacagtcatatgtcatgtgtgcaagacacttctatttctgcagcccggcgagggccagctaactcggttagtgacaatttaatcaaagttccagggcaagcacagagacacagagtctaagtcttgccctccaaaacttacaagcaaactccttctttagaataaccaaaacaaaccctctcgctggctgcctcactaaattaagagaagaaaggggaataagatcacaagtttaaatccacttacttgtgattctgaaaaacaaaaacttaagggtgtttttctttaaatattgactacatgaactctattatatgaggtctgagaggatcctacaaaaggatctgtattattccaatattatcaagattctgagtgttccttatagaaaaaactactgttattaagattttcacaaatcaaacattctgtgtgccaaagaacaaagtgggaaaaatggaacaaaagtgggaataattcccaaaaatggaattattgggtttcatttttggtagcctccttctgtcaactgtagttttgaaaaattcacacaatccaatcccccaagcaacaacgcgctaagtgtttacatcaggtgagagctggtgttggtcacatatgctatgaactagaattggacaatgtcccaaaacggagtgccatctggggtcagagtgccatgcccttctctgcagactccagggacatatccactctgcttaatggaagccactggaaccaagtgtcagacagccctctatttgctccacagagaagaaagccatgctctgatcatgtgaaatgtgactggaattgtaaactgaaaaatggcactaattccactaaatttgcaaatcctgcaacaagactgacaacttaataaacaatacttgaccaaaggctttctttctcgtgaactcaaggttttcactataattaacacaatcattaaagtaaaaaaaaaataaaaataaaaaccctgccttgattcacagttaattttaagcagccaacatcaacatcgggtttcaggcttttgcataaagaaacagcctttaggaaaccctcaacattcaggattttgttctgattcaaacttacaaagaacaatttttagttgagagaaacaaaaaattccagttgaaagacgccttaagattcaaattggaccaacagacaggagaaataaatgaggccagtccaatatttaacatttcagtgtccattttaagctgaaaggaacagacatctacagacacaatttcttctttctctcctataaagggcactgtaatagttatcctaaattctggtatagtatgaagaagcctggattaaagaggcaagagactaagattttaatttgcagttaatggcagctggagaataaatttagcacgccattctaccactgtgggtaatggaacagaaaacaagtccttttttttgtttcttgacacagagtttcgctctgtcacccaggctggagggcagtggcacgatctgggctcactgcaacttcagcctcctgggttcaagcaattctcctgcctccacctcccaaagtgctgtgattacaggtgtgagccaccgtgcccagccagaaaatatgtctttttgatgaagaagctgaagtggatgaccttctgagtctaagaaaactgtttgggacttgggtattcagtagccatggaatatacatcccaaagagcagaagaaaccgtaacactagaccccaacatcaaaaatatgttgctattttctcccacattgctggtaggggtgcaaactgggacactttggcaacttacattaaaatgctatgagagaacaggggaagcattccttaaaagttctaggaaaggtgttatggaggaggtagcatgagaaattcagccaagtgggaaaagcacaaacctgggagtcagagagacaagagtttgaatccctggctctgccattagccaaatatggaaccatgaacaagttatttaacttctcctcggctcaggtgcatcatctgaaatatggggctaatataataataggcaagctcagtatttccccaaatgtgggagagttacacaggatgaatttaagtgatattcagaggattttaggagatgaacaagcacagtattaaacattgaaccacatcatgagaaaatatggttcttttcagcacttcttcagcctatatataacattcttagtacattaaggagtaagcggccgggtgcggcggctcacacctgtgattctagcactttgggaggccgaggtgggtggatcacctgaggtcaggagttggagaccagcctggccaacatgacgaaccccatctctgctaaaaatacaaaaattagccgggtgtggtggcatgcacctgtaatcccagctactagggaggctgaggcaggagaatcgcttgaacccaggaggaagaggttgcagtgagccgaggtggtgccactgcactccagcctgggcaacagagcaagactcgtctcaaaaaaaaaaaggagtaagcttttgtttagtcttctttttgacacctctttaatgcttgctaattcccttttcaacaaagtaagagaagtctcattgtcagctggggcctttgggaaccaatagtttatcttatacatagactgtgagaaaaataatttgtcttcatcctaattatttttaaaattacctttcatttatgataactcatattggttttccaattacaggtcaaatataaagttattttaaaatatattgatgattacaaaaatttgagtcaacttgagtgggctgaaatgctacctatctcagagttccagtgaaaattaaatgagatcatatataagaagaactagcccatgctgtgttccatcacccacggtctggttgatgggtaaaatttcagtaggtgaggaatatgagcagaagatcaagtgtgaaccaaggcaaatacatgagatggacatgagattccagaacaatgaggagccaaacaatgccaggaaggggttcttaaagtagaagatgaaaacctgtagagagagactcatttaacaggtaccaaaccatactatatgttaatcagtctggtgagaaaaccagctatagttccttcgagcatgtgtcttataatccaggacaaaactatcaaagtgggtcacagtcttatttcaaagagccttgaatgccaagcagaaagagatcattaatggtggcagattcttaaaagtcttttgacctctgtccagcacctagtactttccacagtacatggtgtttaacaaacatttgctgaacaaataaatttgtttaatagcactataggtgtattagtgcatttaattttcaaatataaatatgtattgttgttgttaatatcatatcttcttcttccttctctctcacagtaccagacaacagcctaaccccaactaaggtaaactctgccaccaaacatgcctgggaatggagaagggtctgcaggtcagtgtaagctcatcagtctgggccttcactttctccctgcctttccaaggaaagctgctgcttgcatcagtgttgcctttatgtcaaagtgtatcacctaaataccagatccaacagatttcaagccaccaccctccaaagacttgcttcttcaagaaaacaagcgtggtttgactcttgtgaaaaacaattactcccaacctggcatcctacaagaattttgcaaagcaagggtgaacagggatatgacaaccaaacatcttcctagcagctccttccccctccctgctcctggccagaaacctcttcttccttttactccttcttctttccacttctaatttgttatgatctctcaaacaacaaatttggtacagtgctttagaaagctttgtgtcttaccgacctacccccagtgagggtcttctgagatacttcaaactatcctcatgaggtatagtccaattctcctcctaggatgggtactagcatgctattcttgaaggatgaatgagcctgaagagttggttatggtttcctttcatcacctattggcttaacaggagtccattataagaagtaaaacttaggccgggcactgtggctcacatctgtaatcccagcactctgggaagccaaggtgggcagatcacaaggtcaggagttaaagaccagcctagccaccatagtaaaaccccgtctctattaaaaaaatacaaaaattagccggacatggtggcatacgcctgtagtcccagctactcaggaggttgaggcaggagaactgcttgaatctgggaggcggaagttgcagtgagccgagattgcgccactgcactccagcctgggcaacataacgagactccatctcaaaaaaaaaagcaaaacctacacccaaaatgatgtccgagatggagagtccaattttattttagagagattttccaaatggtgagtcagaagcaagaacagtatctcactaaatcatgtttactcaactgaaacttattgaattaaaccaactcctccttcctttgcatttcagatgagaaccccttctggttctatgattcaaatcttcattcactcaaagcaggtaaataggaaatttcaacagcttcctctcctccctctcattcctttcttctgtcatcgatctgatcaggaatgctctgaggcattccctggttattttttctttacctctcaaaatccacatggtatgttacactaatgcccagcatgttcctcagatctctagatggctctaattaaaggaccaccccttcttctgaatacagacctggggttagaggacataagagcttgaagggctctttaaaagtcaagtagtatcattttacagaccaacaacctaaaaaacagaaaagtaaaatgacttgtccaaggtcacatggcttaatggatttgtgggcattcatgaacaccctgtaattacacataaaatttggattatatgagcccatgtgtattttttctgaagagaaaatccgtatctttcttcaaagaagtcaacaatctcttccccaaaatatagtaaccactgacaattatatgcatatttgaaaaaaagtttaactaaaatttaatgttccaagtctgaatagtaatatgaattggtgatctagaataagagtggaacctaatttaataactgtcattgttatcatctttttttcttttcatgtctgggatatcaatgcaagtaacatgggataaagacaatttgatgtggaagtaaactataaagcaagatttttgttttgttttgttttgtttttttgagatggagtctcgctctgtgcagtggcaccatctcggctcactgcaatctctgcctcctgggttcaagcgattcttctgcctaagcctcctgagtagctgggattacaggcttgcaccaccacgcccagctaatttttgtatttttagtagagacggggtttcaccatgctggtcaggctggtctcgaactcctgacctcatgatccgcccaccttggcctcccaaagtgctggaattataggcagaagccatcgcgcccggcctaaagcaagcttttaaaatcactgaaaacactcgtatgaataaatttcactataggccaagcattatattatacggttcacattatacacaaacacaaatacctattttacagatgatgaaactgaggcaaagagtgatcagcaacttgcctaatgtcagatatccattagtaataaccagaattccaatctacattaatttgactctgatatccatgttctttttcaccaatatttgcatctatactccaagatgtcctaatactaatattctatttacttatttagaagaactaaatcaactctctaaggtagcttcaaggaagtctttcataaatggttcaactactaaaaagttcttcctgggaaatatcataaactaaataccagctatcacaaaatatctggactttaagactaaccagataaaatgttttgacttccaaatgcttcttggaagttggatttggcagagaaaacaccggggaattttaaacaaacaccccccaagaaaagactttatagaagaatagatccaatgcatatgaagttactgttttttaaaaaagtgtttaaatctctaaattacttagtgagtcatgtcactcttattaacaaaaataaattaatatacaactcaaagtacttgaatatggaatgccacagactagagcattttcttaaatcacagctgcctcagaaacggaaatgaaactgagcgaaactgaaatgtttgttctacaaaaagtaacctggcctaaataacttaagtatgcactaaaatttctcagtctaacataaacctagccttaactacagttgtttctcatataactctatttctaatgcttttctgtgattaccctgttatcttaagtagtcttttagaagacaggaagcaaacatgagcttcccattctccttgttggacttattcaagtcagcatttattaaattttttccatattaagtgggatgaattaaggccaggggagaatgaatcaaagaccttcctctagagaagcatacactcaagaggaagacaaataaatgttaactgtaattaaaaaacagaattaaatacatgatacaaagagtgctgtaatccaagtctaatggaagtaaagagaaggggatcttactttcaacttagtgatgggaaggagtggatccagaagagcttcatgaggagggaagcatttaaatcgggtcttaaaggaggtttgcaaaagctaaagggttttgtaccaactttgttttcaacatgggaaagacaggatttcaaactttattttgttttaggaaccaaatccagtgctcctccattgttggaataaatgctctttgcctgaatgctatttgtggtcttcgtagaatggagagtaactgaaggccccaccggaaatcaattttatgtaagcttttcattctctggcctcaagtatttctaaaatgtacctttctatgcaggctacttattcaggcaactattttcaggtgaagatactcaaatgaaaatagagaatcccttttggccttttgctaatatttcatttgtcaaaactttgatagtctgacaaagtctttaccatgagattggtaaactcacggaagccaaactgtctgggatgcgacttcagctccactacttacgaactccataataatgtacctagcctgcctatacctcagtttcccatctataaagacaataaaagcacctatttcactcatgagaatgaactgagttattacacggaaaacttaaaaacatatccaacataccataaatcaacagtaaatgtaactatttttaccaagaggtgtcttcaaagagtttatttctaattcattacaccaattaataagaaaggcactttctcatcctatttcacttttacaaggcagacattttttttcaagacggagtctcactctgtcgcccaggttggagtaaagtggcacgatctcgactcagtgcaacctccgcctcccaggttcaagcaattcttctacttcagcctcccaatcccagtagctgggattacaagcacccaccaccacgcccagctaatttttgtattgttagtagagacggggtttcaccatatttgccaggctggtcttgaactcctgacctcaagtgatcctcctgctttggcctcccaaagtgctgggaatacaacaatgagccagtgcacccagccaacaaggcagactttgaaactgtgtttatcttccaaaaatacgtatatcttaagaaaaaactaaatttgatttctaaacagtaacagcagtaacagagaaatagcttatttcaaaaggtccacaacttcatcaaggacaggacaagcaagaatcatattgtattataacaaatttttacaattcaccaaagttaggttttacaactaaactaacagttcacttctctttttcctttgtttcttaggcccttacagcctaatactctatcattccattttctatagatcacataggaaaacattttgagatcacacagctattcgcaaacatctgactgaagcaatagtatagttttcattatgaaccaagtaaaaaattgagttgagtaaattttattctattctttccaggatgttgcaatccctacgcaaccaaggtttcaagttaaagagaatttggctgacccactcacagcaacaaggaaaatatgatacaggctgtagattctgataaggattatagcagatgaatgtagagaatgtggtgatcatccttgaaaagctccctggttgcagcagctgaaatgttagtgctggagttaaagaactctggctgggttcaagtcttagctctgcctcttgcaaggtatatagccagagaaaaattagcttctcatttacttaatcttgtaaactagggacaataaatggttttgttgtgaaaattcaattagcatttgatgacctgcacagtggcttatgcctgtaatcccagcactttgggaggctgatgtgggaggatcacttgagcccaggagttcaagaccagtctgagcaagatagtgagaccttgtctttacaaaaaattgtaaaaatttagccaggagcagtggtgcgtgcctgtggccccagctccttaagaggctgatgtatgaggatcacgtgagcgcaggaggctgaggttgcagtgagccttgtctgtgcagctgcactccaccctgtgcaacagagcaagaccctatctcaaaataaatacaatgaataaacacgtgaaaaacatttcaaacagtacttgccacacagtgctatataagtgtctattcaacactgcaataactttggccattcatggttgtatccacatgcagatacgaagatggttgcattttttggagtaggccttctctcagcataaacaaaacaagtgttcagaatgatcttttaacatttgatgctagagtaaatgaccataacaactactataatggtattatttatttaatatctggatacttaaaaaaatgtatttgaggccaggtgtggtggctcatgcctgtaatcccagcactttgggaggctgaggctggcagatcacttgaggtcaggagcttgagaccagcctggccaacatggtgaaaccctgtccctactaaaaacacaaaaactagccgggtgtggtggcacgcacctgtaatcccagctactcaggaggttgaggcaggagaatcacctgaacctgagaggcggaagttgcagtgagccaagatcattctactgcgctccagcctaggcaaaagagcaagactccatctcagaaaaaaaaaaaaaagaaaaagtatttggttttaaaagtattttagaaatgcaaaaaccacatgcattttgatattttctagacatctagatatcttcataattagaagagtctatctaaggtaatgttcacttattctagcagctaaaaatgaaaacagtgaagaccttaatttgtagccactacatatatagcttaagtatcccggcttacgggagagaagatccctttaaaaaaaaaatttaaatggaaaaatatcccaaccaactcctctccaaaaaggtaagtactacagaagataataaaaagctaagtcactgaacttcttcagtttcattcatttttttatgtttacaatgggacttccttgagcagaaggaaccaatccttgaaaacaatcaattcctgatcactcttttccaatcctgcactaatgcactgtctcacacaaaccgaaaatatgttctaagtcaaaatgtgtccaggggtcgggcgcggtgcctcacgcctgtaatcccagcactttgggaggccgaggcgggtggatcaagaggtcaggaaatcgagaccatcctggccaacatggtgaaactctgtctctactgaaaatgcaaaaactagccaggcatggtggcgtgcgcctatagtcccagctactcaggaggctgaggcaggagaatctcttgaacccaggaggtggaggttgcagtgagccatatcgtgccactgcactccagcctgggaaacagagcgagactgcatctcaaaaaaaaaaaaaatgtgcccagggtccattataggcctgcactcgtagaaatacgagggttgagatttcaaatgctcatctgcaggggagacaacatatcacacgtgtccaggttacagtcagatatgtcattctggaacactatgcgggtgctcaaatacagactcctaaattgctctgacaacagtagcaattctagtcccttaaatggcttgtagtcatcgtgaaggctgaagacccacttccccggtccttctgattgtaaaccaatgttttcctaaaattccctagcattaattattttaatggtttgtggaattatttaatggtttgtggaagcacttgggaaacaggctgacaatggaaactttgtatttgaaaaatattgtaatatctgtagaggttctactcaggaatactttccatgcttccatactttctctgatttaggagaaagtttctcaagagaatgatactctcaacagaaacggaaagtttctcaacagaaagcctccattatttttgtggtaggtatgagaagaataggttgaaataaaaggggagatgaaaacttaaggactttaagttttgtttgaaaagaagatcataatttaagtctgggttctaaactacggccgttaaaaaaaaaagaaaaaaaaatcaagaaaattccactctttaacttgggggaaatttttgtgaggttctcttcgtgggaagcagggattcggccatggagggcaagtgacttgctgatttcagtacccagaaggtttttttaaatatgaaatttgtccactatgagatgaatgtgtatatactacccattctcttcttgaagtgtcaatgaaaagtcggattttaaaagctaatggtatcagtgctgcaaaggcaggccaattactgccagtgccagacaacttttttctttgtttatttttaatcttatttctttgcttctttttgataaaagatatacctaaagaggcacctacacataaccctggcaccgtccgccgccccaagaaccttcctgctttaccaatggcctgggagttggcaaacacgctaacaaaaaaaaaaaccaaaaaaacaaaaaaaaaaaaacaaaacgggctttcgcctcaacctcatagttcctccccgtctgcaaccaccggtcttcaccggattcacagtcggaaccgcgagcaaagacacctagtagagccggccgattcctaggtcctccggccaggaggcgctgcgggccagtctccgggggccaccgcagcccgcgcgcccagcacccccaccctcacggcagagcccagcccagccccgcggcggagctccgagttctgcgccgcccgccggggttactcccggtcattccacggcaccacctcggcccagcttccccatctgcgcccaggcagaagctgccccgagagaccagcagcaacggtctggaagatggggctgcagggaacgtgggagagggaggattgggcaccccacctccgggtctccgcaggctctcctaagtcttgtttttaaaagaaacaaaactcggccgcgcgcggtggctcacgcctataatcccagcacttggggaggccgaggccggtggatcacctgaggtcgagggttcgagaccagcctggccaacaagttgaaaccccgtctctactaaaaatacaaaaattagctggatgtggtgacgcgcctgtaatcccagctactcaggaggctgaggcaggagaatcgcttgaacccgggaggcggaggttgcagtgagcggagatcgttccattgcactccagcctgggcgacagaccgagacttaaaggaaagaaaaaaaagaaaaagaaaaggaaacaaaactcgtccgcgctctgcgccagggacaccagctcagctgagcgcacggagactgtaggcaggacctccctacccctcaggtcaaacaaagacccaaggcctctagtgagcaatagcaccacggaccgtttgggacacctccaactcgagttcccggattcacagtccgggactgtgccgctccagtcccggggagcatatagccaattcccaggtcagaacagaccagcttcttaagaaccgagtgaagactcagtgctggcatttgtctccgtaggtactggccgacctgcaaccagaagggtttctagccagctcagggccctccgaacaaagcagcgctcggtgccggacctgcagctctccccacccggcagcagcgccctcagcacgcccgggaacccccgacccctctgagcccggggtactgcgcccgggtctccacgcccagagatgctccccggtctccaccgtcgggcaagccccaagcgcagcagcgcagagtcctggggtcaccagagctcgtactaggacatcgtctccccatttaacaccgcctccggtcccatctgagttgcaagtggtggggatgtggggctccggatcaaagtccccgaaaccgagcacttcccgaagcctccttggcctcgaaacaaaacaataacgcccaagtaagtcactggagagcctcttacctgttttccacttttgtgtttgcgtctctttctcctaccccttgacaagccttccggagaaggggagaaaacagaaccggggaaaaaacaaggagcaaagcgccctgagaaccggctctgttggtgcgcggagctccccgccctgccctgccgcagcccgggagagaagggtcggctcggctctgcgggtcccggccccactcactctcgctcgcaattacggggtttttgccgggactagttccttttatagattcggctgcaccgagcgcagaggttactatcggtcaaagcctgtgctctccctcctccccgccccgttcccggcctctgtttatgtagttcagtcactcagcagaaagcacgtggagccggggcccgccccttaaacgggcgacgttcagccgcccacgacacatctagggagttggggggaggtgggtggggtgggggtggagggtacagcaggtgtcttagggtccgcggtctgcgtccccttcccccgcccgggcccgccggcctaagacgcgcgggaagcgctgggctcggggctgcgccgcagactctctagtccacgttcccggcagccaagggcaccagtggaatttgcttcctctaaatcctgctttccgcaatttttttttcctttgttagtttcctcagccggagggagggattgggggagagagagctctaggctgaatctccctcaggacgccaatcattttgtcttgtcttttgtttcctttcaaaggcctaggctggggtgaggggaaggcggacagtcctctgggtaatgggctgcttttgttttccccccacaaacctggactttgatttttgataggcgacctactgccttggagattcccagcctgagctccccaggtccctcagaggacccgagaggaacatcttactgcttctcttcataaattgagaggaaggaggccacaaaaacaaaaaaagaaacaaacaaacaaaaacacagaacaatatggaccagcccccttttaatttcattatattgatcagcctccctgtgataaaaacacaggacttgtatttagtttgtatacatttgtgaagtgcagccagagaattgcagtcgtgtaaaattatgtagccactccagacctccaacttatctgtttgcctttggctgtaggggagcaaaactacccaaaacactggaggggcaaaaaaaaaggcaagagtaggaatgcaggcctacacaccatatgtctaaatatttaagtcatccatcaagccaacaaactaaatgtcaccttattctggccaaaactcaggtcaaactgtgaagagtctaaatatgaatctgccctgaagggcagattcatagaagactcaggacagacccgtagaagaggcccaagcaggccctggaagtgcacgtggaggccacaaggtctcctaccttgacaaagatacctttgtagccaccttgaagggcagattcacatttagactcttcacagtttgacctgagttttggccagaatgaggtggcatgagagagctgccccaagcctacttctcttcccacctccagctccatcatattccagaactcccaccacctgcatacagacattcagctgcacaagccccctccatgctacagtcaacaggatctccaggccacggctcaagcccaggtactcacatcagtggttctatcaacactcaggacagacccatagaagaggcccaagcaggccctggaagtgcatgtggaggccaccaggcaaggaattctggagtcccaggtactcataactctgggtggcatggcccctttgcaccatggactgtttgcccttagaaagggatggatctgagctgggcgcagtggctcatgcctgtaatcccagcactttgggaggccaaggtgggcagctcacctcaggtcaggagttcgaaaccaacctggccaacatgatgaaacccagtctttactaaaaatacaaaaattagccagatgtggtggcgagcgcctgttatctcaggaggctgaggcaggagaatcgcttgaacccgggaggcagaggttacagtgagtcgagatcatgccactgcactccagcctgagtgacagagcaagactccgtgtcaagaaaaataaaaagaaagggatggatctcagaaaggccagagatgagctttctaaagcccaaggcccaggagagcggacccccttgcctcagtcaaagaataaccttggtcaataaattgggttttggggtcaaacttgacaaccacatgatgagcaatttacgtaaagtctttctgcctctgtttcatcttgtttttttcttttttcatctttttttccttccttccttccttccttcctccccccctccctcctcccctcccctcccctcatctcctctcctctcctctttctttctttctctttcatttcttttttttgagacagggtcttgctctgtctacccaggctggagtgcagtgatccaatcatggctcagtgtagacttgactccctgggctcaagcgatcctcccaccttagcctcccaagtagctgggaccacaggtgcatgccaccacacccatctaattttcgtattttttttgtagagacagggttttgccatgttatccaggctggtctcaaactctggagctcaagcgatcctctggcctcagcctcccaaagtgctgggattacaggcattagccattgtgcccggcctgtttcttcatctttaaaatggagagaagatgtatattctgtcttcctcaaaggggttttctgaaagtgaactttgttgaaacctttgagctccttggcagaatgatgttataaaagcagagagtgttattaaaaggtgttatctttcctagcatgattttagagagtaattagatctccctgaccctccatctcctctctccttcttctcctacctatttgaagtcgaccaccaaaatcattattttttttttaattgagatggagtttcaccttttgttgcccaggctggagtgcaatggtgcgatctgggctcattgcaacctccacctcccgagtagctgagattacaggcacctgccaccatgcccggctaattttttatattttttagtagagacggggtttcactatgttggccaggttggtctcaaactcctgacctcaggcgatccacctcagcctctcaaagtgctggaattataggtgtgagccactgtgcccagcccaaaatcattctttttggaattttgaagcatataattccaaaaggtatgaaggtaatcacttagattgctctaataagggaatgggaacagttaagtcctatacaaataagacaaagataagatactacaaaaaggggatgagcccaagaaaaaaatcaaagtcccagagagagaacagccattgattctaaatacacaagtctatggccccaacccaaacttgtttcactaagaacaacctgtggtttcgagaatctggtcatcccccacagtgaatacatgaacacattgtaatgtttgaaatgtttatttttcttgttgatttcttactgttagaagagctaagtgatttggcccaaagtggctaagtgattcggccagtttgtacacagggatataagtttgctgacaccaagctcatactttacaaatgtaatatcttcataaaacaaaaatactgggccgggcgcggtggctcacgcctgtaatcccagcattttgggaggccgaggcgggcggatcatgagatcaggagatcgagaccatcctggctaacagggtgaaaccccgtctctactaaaaatacaaaaaattagctgggcatggtggcaggcgcctgtagtcccagctgctcgggaggctgaggcagaagaatggtgtgaacctgagaggcagaacttgcagtgagcccagatcacaccactgcactccagcagagcaagactcaaaaatatatatatactgaatctcaaaagctagagcctaagagatgccccttaaaaaagaagcttacaagtgtgaattttcttccctccagcccttaggttggtttgtcttttagtatatttcaataagcttccccctccccatcccatccctgccccccacaccaacaccaaaaccccaagtccctcctctaggtgactccttccaaatacataggaaggccctcctttgttgctgtttttctggagaggctgattctgtaaatgtagcctgggtggcttgaggttctattctgagatgaccctggcatcttctaattacagaatcaaccttcaggcagctgtggccttgcagactctgctggaggtcatggaactacagaaaagctcaatcttatcattctattgaggcttttaaattggagattacctaaatggcattgtttggaggttgctttgatatatgttaactcatctgcataaatgtacatgtacacattgtttaaaataccaatgatactggttgctagaaactctgaaaaaatagagtaatgcaggaagtcaatgaagaataaaaaataatatattttaaaatgatgttttaagatgaatttgttatgattaagaagacctggtggggcacggtggctcatgcctataatcccagcactttgggaggccaaggcgggcagatcacttgaggttaggagtttgagaccagcttggccaacatagtgaaaacctgtctctactaaaaatacaaaaattagctgggcgtggtggtttgcacctatagtcacagctactcgggagtctgaggcaggagaatcacttgaatcagggaggtggaggttgtgatgagccgagattgtgacactgcattccagcctgggcaacccagcaagactcagtctcaaaaaaaaaaaaaaaaaaaaaaaaaaagacaaatgcctaatagctgaaatcttagagattttctggagagtgagaaatgccttaaaataaaataaataaataaataaaaaataagagggataaaaggacctgcagttcaaattgagtcagcttaattccaatacacagttagacacagaaacaaatcgagcaatcaatggtcaaataaaaatgtaccaggaaccatcattatttgtgcagtagaccgtgtattgcagaggctctcaatcaattcaatttaattggaccaatgtgatcctcttctgtattaatgtggctcctgttgacatgcaagcaagattcaaaattattattgcttctggacttgagtaagatgtttgttctgtttgtcattgggatcaagaggttagccttggctgggcactgtggctctggcctgtaatcccagcactttgggaggttgaggcgggtgatcacttgaggtcaggaatttgagaccagcctgaccaacatggtgaaactcatctctactaaaaattcaaaaaaaatttagccatgcatggtggtgcatgcctgtagttccagctacttgggaggctgaggcaagagaattgcttgaactgggaggcagaggttgcggtaagccaagatcatgccactgcactccagcctgggtgacagagcgagactccgtctcaaaaaaaaaaaaaaaaaaaagttagcctgctggattacagacaagtactgcatattccactggatttctagttgattagtgagtgataattctttttaaaaaccacccttccaaccctctttccttcaagctatccccttaagagccaaactgctggaaagatttcatctctaccccctcccttttattaacacctcacccactgcagtcaaattttcactctcacagctctgaatctattctgcccaaattcattaacgacttccttagagagagagaggccagggacgggttgggggggcaaatgtgatctctttttttctttttctttataaaatatttttaacatagaaaaataaagaaaaatatcttaagctcagaaaaaccgcttaattggtggtgctgttgacctcttttaaatccttaggctattcagtctctggtatttgacactactgaccacactttccttcctgaaactgattcctctcttttatttcatgaatctggttctcttctgattcttctgcctctttaaccactctttttctgactattgtttctttatagatctcctaatactggttttctcttttcatttctacttgctctcctcatcaatattattcacgcccttggcttcatttaagccctgtacctccagctcttgtctccttgccaggctcacccaccgtgcgccctatgctgcctggtagaatatccagcagcatggtgtgttggagccagcacacaagctcacaagagttgtttttgcatatctctttttgtttgtttgtttgtttgcatatctctaccagctagcttgaaatcggccaacggcatgaatattacaccattggaaatccaatataaatcagtgtcgatgaaaagagtaaaactctgtaaaatatttagagatttatggtgagccaaatatgagtgatcttggccctcaggagacagccctcaggagatcctaagaacatgcacccaaggtggttggggtgcagcttggtttttagggagatatgagacttcaatcaaataagtttaagaaatacattggttcagttcaaaaaggcagggcaacttgaagtgggggcttctaggttatagatagatttaaaatttttctggttgacaattggttgagtttatctaaagacctgggatcaatagaaaggaaatgtctggcttaagataaaggattgtggagaccaaagttctcagtgtgcagaggaagccttcaggtagcaggcttcagagagaatagattgtaaatgcttcttaacagacttaaggtctgtgttgatgttaatgccagagaggcataatgaggcctgtccgacccccacttcccgtcatgacctgaaccagtctttcatgttaaattttaagagtgcccttgcagaggaggaagttcattcagatggtgaaggggggcctcagaattttatttttggtttacatcagggttttgtttggtttggtttttgtatggaaagccacttgttaacatttattaggacaaaattttgcaggtcattctacaagtaaatccaaaacaaacaaatttcttgtctttccttcaaatctccttctaccatctgcctttttaaaaattttcatttaatgatatcatcatccagacattcactatgggaaatcatagtcatccttgcttaactttttcatctgtctctatctttctcttctcatttgaaaaagcaccaaggtcaggtcaagtatacctcccaaatattttatttttttaattcatcatttatttttcattcccagtgtctaagtccaagccaaacatctgggcttctgtattgcagaacctccaaactgctgttcctgtctctagtttcttccccttcctatttgtcttccctattgcagtaaagtgattttttgcttggggaaaaaaacaaacaagcaaaccaacacaaaaacaatctaatcatatattttctccctccaaaaaaaaaaatttctttttttttgagatggagtctcactctgtctcccagactggagtgcagtggcacaatctcaactcattgcaacatctgcctcccgggttccagcaagtctgctgcctcagctgcccgagtagctggagttataggcacatgcaaccacatccaactaactttttgttttttcagtagagacggggtttcaccattttggccaggctggtctcgaactcctgacctcaaatgatccacctgcctctgcctgccacagtgctgggattacaggcgtgagccaccgcgcccagcccatccctcaaaatttactatggttctcctttgctcacaaaggaaaaataccctcaaagttctgtaagaagacctacaaagcctctgaaaacaagatattggaaggcctttgaagcctgatcatatgacctgcttcctcctccatcctcttccatccatccacaccccaccccttactcacccccattctaccaactcacgactctcatcatactttcccattgcttggaaatgcttcctctcatctccactcctgtcgtcctgttatgcttttattctagaagcagtaggaaagaggggcagaaaaaagaaattcacttccctcattaaatggaaagttgtgagatagagggtatatgaagaaagagagagagatttttaagtatccaaattgataggcaaatattacccccaactcagatccattatcaagtgtaacaatagattcacagaagcagtcagtacccttaaatttgccaagaaaataattggactcaggggattaaaagaaatcaagcgcttattataatagaagtagtgcatctgcgtttctttccttattcagagtacttttttgacacttaagaatccatattcctggctgtgatttctgggatgagggactgttttatttcttagccaggagcttttcttttctctgacatattaataagagagtaagtcattagaaaaaaaaaaaatcctaggaaatgttccagatactgttttctattagacttctagagagacaatcctctttctctttcagcattttgggaacgatttcttcaggagtgcatggtttttcctttgttgccctcaatagtctgtgttgttttgacccatccttgcccagtattccttatgacttctggaattgtctggacagaagaaatacttttgccttgtcaaaggttaaatgtggagatgtgctatgaccccactgtgggagcaggccttttattttccttctgtatctccattcttctggtgactgacgtccagtgaaattagagcaatttcttagctggctacttgtcctggtgtgtaaattagtgaggaatgagctccattcatagagtcctgggcttgccacagagcggaccccaaagctggtttccccttgagtggctcaattacctaacagagttcaacaggaagcccccacatctgcctactcaccactgggattggaagccctggacacactgcctgaatgagaacagaaagctaagttgggggtgcagtcttaaggtatctaaggaaaatagaataggaggttggggaaaagagggaaaataatgtaatcatactcataaaaactgagggtgttagtagggtgcaaagaggcccaacattctgatagtttagcaaaatgtatcaagaggctttggtccaggaccagtggctcatgcctgtaatcccagcactttgggaggccgaggcatgcagatcacctgaggtcaggagtttgagaccagcctgaccaacatggagaaaccctgtctctactaaaactacaaaattagccaggcatggtagtgcatgcctgtaatcccagctactcaggaggctgaggcaggagaattgcttgaacctgggaggaggaggttgtggtgaaccgagatcacaccattgcactccagcctgggcaacgagagcgaaactccgcctcaaaaaaaaaaagcctttggcccactaattttacttggaggaatttatactaaggaaatatccgatagtatggtaaaaaaaacttatgttcaagaatgttgtcactattttattgatgagtgaacattttaaaaatgcttaatcatctgataacaattctaaaatacacattgataaattcacatgatagaatgttatatagccatgaaaggtgaaaataatgttttcaaagagttgtgatataggaaactgctcatggtaaatgcgaattgaaaaaaaaagcaaagctatatttatgtgtatggttaacattcaataaaaaataactgttactatattgataacctttttcattgaatatatgtgcctagaaaagactgcaaaaaaaaaaaaaaaagaaaaagaaaaaagaaaaaaaaaatcccagataggtgctaacagcaatcacctgtggatggtaagattataggtaattttttcatatatgtctgtattttacaaaatttataaaataaacacatgctatatatatgtatacacacacacacacacacacacacacacacacgtaaatatttatatatatatatatatatatactttattttttgagacagggtctcactctgttgcccaggttggaatgcagtggccccatctcggctcactgcaacctccacctcccgggttcaagcgattctcctgcctcaatctcctgagtagctgggactacaggtgcccatcaccatgcccggctaactttttttttttgtaattttagttgagacagggtttcaccatgttggccaggctggtctcaaactcccaacctcaggtgatccacccgcctcagcctcccaaagtgctgggattacaggtgtgagccaccatgcccagccttatatgctatttttaaatttagaaaaatgatatgaaaaatagagtttttcaaaaaaaaaaagaaaaatagagtttgtcaataattagtaggaggaaagagtttataaatgaagaaaggcaaacaagaaattaacacatggaaacagcaaatcctaacatattttaaaagcatgtgtacatagtaacaaagaacagaagagaatttggagagacaaaaatagttaagacagatttgatgagtaggtaaactgtaaaagaaaatagaattttagaccaatcataagagtttactactaaatgaaagtcctgtgtgtttaaacctttctgcttatctgatcttctgacttatccttcttatctgcagatcatatctgggtgtccatcagcatgttacttcacatctctgtacctcagtttattcatctttcaaatggaagcaacatatagagctgccttatagagttgctctgggtattagatgtataatatatgtgaactgcttggtactgggcctggtatatggtatgtgctcaataaatgatagttgtttattattgtcatttattatcatcatcatcatcatcataattaaatattattccaagcaacaatgtgttcctcatagtccaacaataatttaataaatgtaacctttccaaaactccgatctgcaaattttaaataaatattttcaattaaattaatcagtatgaattattcaccagcctggagttcaaatatggtctgcctctctcctctctctctgtctcagatgtgggagtcttgctttctcacccaggctagtgtaaaatggcacaatcatagctcactgcagcctctaactcctgggctcaagggatcctcctgcctcagcctcctaagtagctgggattacaggcacgcaccaccacgcttagctgattttttaaaattttatgtttagggacggggtctcactatgctgcccagactgatctcaaactcctggtctcaaacaatactcccacctcagcctcccaagtcactgggattacaggcacaagccaccacgcccatctctcatatttctttttaatttcctatctactcacccaaatacccacccatttattagcagaaagtccagtatctctttcatgtgatacctctccctcctctttctctctctcgctccccctccatctatcagaattgcctcaaagccctggggttctagagatacgggaaatccaatctgttcaccatcgtgcaccatattttcagtggtcagttgtgctgtcactagcatacagtagcatcactgaagactagttgcacaccaggggcccactggccacacccagctctctgacacatggtttgggctgaagagtgttagtattttgtttgaaataaccaactagggccgggcgcagtggctcacacccataatccctgcactttgagaggcctaggcagatggatcacctgaggtcaggagttcgagaccagcctgaccaacatggagaaaccccgtctctactaaaaatacaaaatgagtcaggcatggcggcacatgtctcagctacttgggaggctgaggcaggagaatcgcttgaatccaggaggcagaggttgcggcgagccaagatcacgtcattgcactccagcctgggcaacgagagcaaaactctgcctcaaaaaaaaaaaagaaagaaagaaagaaaaaaagaaaaacagaaatagccaacaagtttggaagtgtcacacagaaatgtttgtgtttctcatttctgttgaaaaggtggaagatctcaccatacaagacgtatttccacacaacaacaatcagctagtactgaaaagctctctttagatgg

SEQ ID NO: 617 - DNA, 25837 bp, Mus musculus
ttgtgttctgttctctccttctactctgttggtcccagggatgaaactcaggcttagggtaagcacctttactcgctgagccatcctgtcactcccaaaagggagaaggagggagggagtgtgtgtgtgtgtgtgtgtgtgtgtgcgcgcgcgcgctcaggacagttgaggggagtcagttctcttctcccacctatgggccctagggattgaactcaggtcatcagacttgatggcagatgcgtttatggctgaatcatctcagcggccccaccctaacttccctttatcaagctttgcctcctaaaagttccattatatcttcttagcgccacatactgatgaccaagtctcaacatgggagcctttaggcaacagccaagatcctcacagggccctctctaacccttcccaggttcctctctagcccttcccagcacagcttctgagtgggagacacttcattttcctctactgcggggggtcttgtgatgcttaaggctcaaacatggtcctacactctctaggcaaacattccactgcagagctgtgacctcagccctggatctggtttataatctcatttgcttctttcagaccaaaggctgctaccctggtaactaaaaattgggtaacttacttgtttattgtcctgctctgtctatcagcagcctgtggggtaggctccagaggcacaggtccagaaagatccgccacctcgctcaagttcccttccacctcctcaggaagcaatgaagctagaatcaagctgagtcttcccaccccggcggtgcctgtggcacctttgccacctccacctgacagagaagtgagccctcagctgggcactcaggagagctggtcaagtgatagcctcttgtgacctgaggcctgggaacatcactcaggaaagcagacaggagggcacagaagggaagtggagcccacaagacctttgaaaagcctgggtgggagcttagatttggagaaacctcattttcaggtctaaaaaaaaaaatccaaaaggggagaaagagaatttaacagacaggaaaacacatggggggagagtgctggtctggaagagggagtggggtggaaatatcaagattctgttagtgaagagaggcgcttgccatctgctcctgattgatcacaggccttaaagtctcggcccaaggtcagaggtggcagagagtaaacccccatgacctgagtttgagccttagaaagggaagagaaagccaactcctgaaagttgtccctcacctccacatacatgccataactccacatacatgccatagcgcgtgtgtacccatgtacacagctaacaattgtttaaatgttttcaatctctaaacaagggatggaaacagagcactacatatatacaacacatgcaccacatataccacatgtgtacacatgtactcatttgcatgtactgtgacatgcacacatatgcatatattttaaaagtaggagctgggcgtggtagtgcacacctttaatcccagcactcgggaggcagaggcaggtggatttctgagttcgaggccagcctggtctacaaagtgagctccaggacagccagggctatacagagaaaccctgtctcgaaaaaaccaaaaaaaaaaaaaaagtaggaacgggattttttttaaagtgtggcctttatagggaagtaactaggggtggttagaaaatgatctaggcaagagatactgtcccttgactggaagcaggcagtctgggggctgaggtgtccaccactgaacgagcggactctttagacttagccgctgtggggccgggaagaaggaattaagcatgactccaggaacttacacctcaaagattgggggaagggaggcggtgccaaacaagggctcttaaaggagtagcaggcttctggggaagttaatgagtttgaaatttaacgtaagtgttacatactagtaagataaccaagaaaaaaagttggatctatggatctggaaccaaaaaaaaaaaaaaaggatttcagtaactccgtttacatttagtgtgtgtgtgcgtgtgcatgtgcgtgtgtgtgtgtgtgtgtgtgtgtacatgtgtgtgcacatatgtatgagtatgtgtgtgtgtgtgatcatttctcttactaggcgggttctgaggatacaactcaggtcatcaagcctgatgacaagtgcctctcttcactgaacatctggctcattccatccactgcagtacatgagcagtgtggctgaagccatggacctagatgatgtcaaaatgggcatggggagtgaggtcaggcacagctgtgtgcaagcacttatgaaaggtgaaggagccataggcagcaccagcagtggccgtgggacagtgggagagacctgggatggcactaaggcagaggccaaggccatggatacaggccagaagcccctcatctctagagctctccatgagctcaatcaggagctgagcacaagctaagccagcagagtgatggggaaagaagaagatgggtatggcccagctcacaccccataggtggatttttccttctagggtaaggagtgtcttaaacccctatttgctgtaggatttgatgttgttaggctggccccagctcctctaacacccatgccagctgactgagcattggcatttgggcaaatgtggtccctcccctctcactcattgtgtcttacaaggggctacatgggagttggcgtcacctgtcacctggagaagctctgggcctgctcaccctgctactcttgctctgtctcctagagtctgtcctagggaactgcctggaaagaagttctcctggacaagcaatggagctgccggatcacaacggccttgggtacccagtacggcccttagtcagtgagcacctcaggtcccggacgctccagagacaccacacgatccagaacagcgacgatgcctatgtatgttggcccctcctgctgcttagaggtgggatggtgccatctcaacctgaaagcagagtgtccccttctgccgccatctcctcagtccagccctctgcaagctgtggagaccttttttttttctttgactccccataacagaccagcattaacaggagagtcttgcggccatatgttagacttaggaatcaaatgatctgacatccagggtcttgacctctcccagaaatctaaatccaggcttcaatatatgaaccctcaatttttggtccattcctggcaactgttttgctttctttggctttcttaagagttgacctgtcagagcaagtcttgtcaactgggacacacccagccatggtagcacctgtatgccttcaggcaaccatttgtggctgttcaaatgtaaatgtgtttaagttacacaaaattagaaatttagttctgcggtagtaaataacagttacacttcacacacacagcagtcaccatgttacatgggcacttgagaacagaactgttagacctcactgtctatagatgggttggggagggacaggggtcccctgagagtgacacactgtctgtcactcattgctgctggttccactctacaggtacagctggataccttgccaggaatgagcctggtggcaggcaaggcgctgagctctgcccggatgtcagatgcagttcttagtcagtcttcactcatgggcagccaacagtttcaggatgaggaagatgaaggtaaggccttgcccatgggcaccccggggcagtcttctgtggaaattgttcactggctgaggtgctacgcacatgtgcacacgttaggggctctggcttctgtcagcacagggacatcacagtccaagttcagtgctggagcaggatgtaccttcaacaatagccctctttcagcttctccttagagggcttcatatccttgtagaacatttatttctatgtctttgtagagccagggtgggagaccatgatagagcctggagacggacaggttcaccctttctaaggtccacaggcaaagcctaggaagtcttcatcccaagtcttcacctgtgaggacatcaagagagcagtgcccatgtcctggcttgggtcctaaggatgctggcctcctgaggtttattagtgtttattagtgtgatgctcaagagaaagtggcctggcctggctcctatagcactcactacagttatcctgccccctaaccacaagaaaaggctcttgaagggtttttcatcttcacccccatatgtcagttgctcatgagggtggcgaaaggaaggggcaggtggtcaggaagggtccctaacatctgaagggcctgctgtggcctgagtcagagctggactcaggctgggttgctagacaagacctccccagcctcctctctcctgtcccacttgctcccccacctccacctcacatgttctttttggtcttgcagaatgtggggtgagcctgggccacgagcatccaggcctgggtgatggcagccagcatctcaactcctctcgctatccagctacgtgtgttacagacatcatgctcagccacaagcacccagaggtctccttcagcatggagcaagccggcgtgtagcaagatatggaaagtgagtgccaccctgctcaggcccaggcagccctggggcccagtgccagcccctcatagcctcaatgtgttcattccttgtgtggtaccccactaaacttgagcgacactctttttgtgcaaccttccccgtctgcctgtttcttcattaagtactgtgttagttttgaggtgggctgaggactttaatttagggaagaggtacatggcccacctcatgttatagatgctatggctttaatgagatccaagctacagttgcagaggccagaggccaatgacctttggccagctctctaaagctagtctttacactccatcctgaagagtgaaacccaaccagaaaagggaaaaagagcagatccagtcaggctccttcactggtggtttttattgtttggttttggcattttggtgctaagcatagaacccagggccgtgtaagccccagccccagcctcaaccccagccccagccccagctggactttttagggggtaaacccatgctgaaaagacagaaggctcaccggccctgttggcctagcagaggtcacatggatggtgagtactagtggctctatctctacagagacagaacaacttgaggaaggtaaagccacaggcagaggcatggcagagcctcagtgtggcaagactcatacagtgacaccaagaaaagacttcactgagagcctgcatgcctgtggctcactgacagagcagggcatggacacatagggccctgagtcccagccctagtaccattagaaagggtggggagaaagggtgaagtcatgtccctctccttcaaggtgttcttgtctgcttcgtaggttcgagtacagctccaggaggaggctgagtctagaccaatagaccaacagtgtccaacagcgccgcaccgctcctccgtctgtgtctccaccacaacagtgcagctccttcccctacactaggcaccagtaggccggcgcttgggttgcgagggacatttgccatgtttgcttgtatgaccaaggcaccaaggaaataaacaggaaatcagtgtcctccatctttcatgagccagcatctggtgtgcttgagttgagttctgctgttaggaggtttgcttgtgttttgttttggaaattttcctttggagataacttattctctttgccttgcccacccctacccccttgagcatattcccccccccctctcgttttcacctaccatttctgaggtagatgaaccagaggttagtattcaggggctgaacctcaggaccctcccttccacagcctgtctcagaccagactctctccctctgccccggtctaccaggaacaaatgctagaccggagcttggtggccaagaaaaggagaggagggggcagtggcccctgcctttggagattggaacagaagaaaaaactgagcctgggatctggcagaatctcctgctggcctctactagaatcctatctggcccagcagaattccatcagatcccagcacaggccggatggcctggtgctgaaggtttgccatccagaatagctcagtgtaggcccctctggtgtgtggtccagttcccctccagtcaccaactggttccccctcatgagtgaacacccaggagtggtgcactgtgctgtttgtgtgatctccattcttattctctactgcgttgtaaaaagggccgttggtccatttgtgtgcacacgtatgagtgtgtacatgcccttccctgcggcctctttgtcacagacaagaattggaggctgtactgggtctcttaaccttctcctctccccagcatcctcggcccctatattttaattcttgatcatgtaggaattgtttttgataaatgttgatattattgttattattgttattattaataaagacaaaaaggattttgtttatttgtttaaaagagaaatgtttaaccagattctgtgctgttgaactgtggcttgcaacttctgtttgaagtgttttccttggctttggcatcgtgagccactctcctgtgccagcagcggatgcagtggcctcccttccccagccgaagcagcacataggcagtggctactgtccttgtcacttcctttctctctgcagtcagaaaccaaagtctggggccaaacgaggccggcccggcttctcttctggtcttcaaaaccagagagggatggtccctgctctgactcccagccctcatttctgagagccaggggccaccaacctctgagtatgcacagaagaaagccgctgcctgccatggcatctggacattaccagcagggtccctagccattttatccttccgcaccaaccctgaaagcttgcctctttgaacaaatccattgtctcttgaatggatttgttttcaatgtgagagcttggctggggacctgtttcgtggtcccatgtcctccaatttcccctccacttcaggtgtcactaattactagccagaagatgtctgactcccaagaaagcttgacaagccattgtcagcttccaagctcagtccagctctgatactccagccccgccctgctgctccccacgctcagcctgacctgtttacgtggtactggattgatggaagagcaggcaccaccctccagagccacccagacgaaagccagtgagcctattaaccgtgccatcttgcgaactattttcaagatcaccattgctttatattgtagtaaccaatatgcgcagtatatgttgaatgtatatgaatctactttgctatttctgttctttgaaaatgtaagaagtatttttcctttctcatttctgttgatctaaaaatgataataataataataatctccagattcaagttgctaagagcttttgtccttgtttgtgtgggacatctacaacttagtgacttggttggactgtaggaggttgtggaaataaaaacctgattatgtactaacgctgatatgttgtttgccttacggttcagagtctaattgagagaatcacatggggtaggggcagaggtgacccaggtgtctggagaagtccccagacttagggtggggcttggagcagcacattctcaccttgccttttggcctctgaacctggcaaatcagactcacactgtgtccaggcatccgtgtggactctaacccctcagaagggacacatttgtgtttgcagagttgggtgggaaaaggattccttggggtcctcagaaggagagccttgcattgaccctggctggaacctttatgaggtggcctccctcagctgtaggacagaagggcttttggtactgtttcccaatgtctgttcctggattccaggtggagggcagaatttccaacagggccccaggctctgctgaaagagctgaagtcacacgagaaaaaagatcaatgatctggggaatacggagatttgtagaaagagtgacagaggctggaaggatggctcagtggttaagagcaccaacttcctgcaactcacaccacacagaactccaattccaaggacccgacatgcttcccaggctcctgtgtacagataacatacactcatacagatagaaaactctttaggcagggagaggcgcatataagaaagcctttgaggctagaattgcaatgaaactgctcagagtggaaggtgccttctcagcccctggaggtcttgaaggtgtacgcaccgcacagaggtgagctggctttggaaccagtgatgggccctaaggactcccaaaaggtcaggacacctttcactgatgctgtgtctgcaaagtttttggctagaggtcgggtaggtacccagaggcagccagattgactctgggatctgaacctggacatctctgccctccaagaaggaaagaaagacttcctgactttgtactggagccaggccccacccacttaaccacggagactttagtctcctgagcaggaggcaggaacatcattcagagctgatgacagtgtccttccaaacaggaatcactggggatccagtctgcttagggagaccctccccagccctggctccccattcctgctagcactaccccttgttgggtacatattcccagaaggggctggcaccattgaaggcctgcgcctttctgtgaccctttgccagtctgagaagctttggtgtatcaatgttattcatttagtaaatgtttggtgtctctggtgccagtcccactaaaggacagagtccttgcactgccctgtgcaggtgatctgtgctgagacagaagttgtgaaatgggctacattcgctgctgctgaagctaccagcactcccgggatcccaggccagcacttgctggtccaatccaggagtcactttggaggttcccaagatgagggggtgaagggtagtgagagaaatgccaatgataggcactatcttcactccctggtcacccaacacctctaacagcagccaacctgtctcaatctgtgatgagcccatttgactcttgatctgtccagaaagacttcctgttcagaacagtaagtagctatttagactagtttaaaccaaatgtctcctgataaagtaagtcactagcaagtaagtatggggtgtgggggagggagcatggagcatacacctataaccttagcatagaaagccaaggcaggaggattaccacaagtttgagaccagcctggactatataccaagacaggagcacacttattgctcagtcaggttgtcccagagtcgtctaccgtgatgtcatggattccagtccccaagccatgtccctggagagagtacaaaggctttggaagtgaagaaatcaccatcagagaactagaggccggacccgatccctagccccttgggcactgtctcaaagctggggggcaagaatgttcttagcatctctgagctgccgttttttctgacaggcaaactaccaagggggtgaacatggcgtccagccttacaggggtgtctcaagtttactttaaatgagttgcggagcaaatgttaggttcaattaggattagccagcacggtttcagtaacgagccagaaagaaagataggactgtgggaagcatcctggaaaccaacagacacccccacccccaccccacccccaaaagacctaaaaaactactcctgtggaggccacctccctctgagtgctcccacagccctcgggggctggtttcaacctggaaaagatgtcctgcatcacagcacctgcaagccagacacctgccttaccccatttttgctgccagcaactggggtcacaggctatggcctagtaacagaatgtgttcgtggcagtgacctcaggagtctgggatgcagaacacttgccatttgctgttggtcacctttcagcagttttgcttgaaatgtgttcagacttcacagacaacacaacacaaataaaactctggagttcagaagctcaaatcatggctaaaagcatgggattgtcagagtgatattctgtctgaaaactctttcattcagagaaaacctgcattttctcttctctcttccagcacccatggatgggtagccgaaacccgcttggctcatctgcacactcagattgcttggtctctatttctgttctcaagtttctccatggttttggcccttctgcctcctctagcatattgagagacccttgtgattactgtgccctctggatatcccaggctacccttgagttcaagtcccctaatcacatttgccatgttagacaccacgcacaggttcctggacttagtaagtgcacacacatcttttccattttgcttcccatacagtgactgggatcataaggaagctgtggcatgctctgtcattatctttccttagcagataagagacccagggacggagaggttatgtaacctgtccgggtcacctggagaataagttgcagatcccagaaccaaggttctctctggttgcaaagcctcctgggatgggagcagcctggaatcccagccactccctgaactggtagacagattccaagctggtttctagggagttggggagtttcctagggagatgggcagagtacattcctgccctgggtcccaaatgcagagacctgggcgcaaggtccatccttgcctctaaggctgagagataaaggacacagcaaattccttccactctcaacaggcccttatctagaaggaagttcatggtagaacctcaaatagatggtctcaaaagttcctcttagcttgaaaactcactttccataatgggattttagagatgatctgtggtttttgtttgtttgtttgttttgttttgttttgttttgtttttagatattctcatatagcccaggctgacttcaaacttgctatatgggcaaggctgtggttttgaactctcaaccctctgaccttccaagtgcaaaaactggccaccgtactcagcccactctacacagctacccagctctcccatcctggcaagtgagcctaggccctcaccactctgggaagacatatcgtcactgaactacatgaccccttttagtggtcatggtatatggtgaggttttctctggaagggaggctgaataacagcatctacacataacaaaaacattggcaactggggctggagagatggctcagcggtttaagaccactagctgctcttccagaggtcctgagttcaattcccagaaaccatatggtggctcacaaccatctgtaaaggaatctgattccatcttctggtgtgtctgaagacagagcgctcatgtacctaagataaggaagaaaggaagggagggaaggagggagggagacaaggaaggagctaacaactccatgttggcctctgtcatttcttctgaagcatcagaggggtcttcatcctcagcttggggatatgagcctgtctgcatctcactcaggctgacacctcagttgtttttggatttagggttgggaggctggctaaacatgtggcatctggaaagacaaatccccaaacctgggggaccagggtgaggtgaaagggggaaccccttggaaagcaaaaaaaaaactttggggtggggctgtgagtgaaggagcccacaattcctccctccctcccttgttccaggctcagagggcactagcaacacagaggagtccaggagtgggctccatgagactatcttgaagaagacatacacctcgggatggtgcaactgccttacccctggggacccctggagtctgcagccaccccctgctgcccccacctgaacccttgatcccagctcggcagcccccgcagtttcctgtttgcccactctgtttgcccagcctcaggaacagagctgatccttgaactctaagttccacatcgccagcaaaagtaagcagtggcagggccaggctgagcttatcagtctcccagcccagcccctgcccacacacatatatagaccagggaagaagagctggacacccagactgtcggagagctccggggaggtaagtgctgctacctgccttcggtggctctggctccatagcgcctcccagttgatgctccactgtccaaatcaataccgtggatatctcgcacctttagccattctagccaatgcttccatgggcttgaattgtgtgtggagcctttccatgacaatgcctcccttcagcccagccctcctcctccttcttcttcttcaggtcacccacacccttcaggatgaaagctgtggtgctggccgtggctctggtcttcctgacaggtaggtgcctcttgacctgcgtgggactaccttcctgggcacagagaacagaattcccactgttctcttccctgactccgagtctaacctaacatgggtctcccctccatccccagggagccaggcttggcacgtatggcagcaagatgaaccccagtcccaatgggacaaagtgaaggatttcgctaatgtgtatgtggatgcggtcaaagacagcggcagagactatgtgtcccagtttgaatcctcctccttgggccaacagctgaagtaaggaaagacctagcgtggggcctggagcaggtcaagggctgcccatccagggtgggcagagagaccagtgagaagatgctggaactgagctggctagcccttcacgggctttcctaccagctgggcaccatggcaggttccagtggaggactagggatgggattcatctggctgttgggtaaccacagcccctcattcagcctatgagtgccaaatcccttttccttggtaacccccagtactggtcagacagcacccaaaacaaaacaaaacaaaacaaaaaacaaaaaacgggactggccttgtaaccagcaccgaccacatctgtgttcttggtgccttccgccatgtgtacagaggaatgtaaagggaaggcagtgagttagagggttgcatgttcggggaaactaggaccatagcaactgcacattaggggacaggtggcacccagctatcatgtgcatggatctgcagaccaggggcagcgcatgatgcctgggctcgtctctcagccgctctcttccccctctagcctgaatctcctggaaaactgggacactctgggttcaaccgttagtcagctgcaggaacggctgggcccattgactcgggacttctgggataacctggagaaagaaacagattgggtgagacaggagatgaacaaggacctagaggaagtgaaacagaaggtgcagccctacctggacgaattccagaagaaatggaaagaggatgtggagctctaccgccagaaggtggcgcctctgggcgccgagctgcaggagagcgcgcgccagaagctgcaggagctgcaagggagactgtcccctgtggctgaggaatttcgcgaccgcatgcgcacacacgtagactctctgcgcacacagctagcgccccacagcgaacagatgcgcgagagcctggcccagcgcctggctgagctcaagagcaaccctaccttgaacgagtaccacaccagggccaaaacccacctgaagacacttggcgagaaagccagacctgcgctggaggacctgcgccatagtctgatgcccatgctggagacgcttaagacccaagtccagagtgtgatcgacaaggccagcgagactctgactgcccagtgaggtgcccgcttccactccccacccccgcattggctttcttacaataaacctttccaaaatggaatagcttctttctttgggggacatagggcgggcgctaaggggacatcaagggacgtgagaacatggtgccgcactggggattcctttgtacgcgactactcagctcttaacgctcactcaagctgggcacctggctggttcagggtatgagacagaatcccttcctaagaaggctccaagggaaatggatggccaggcaaagcaacaaggaaccccaaaagggccccacagaggctcagaacactagtgctgtaaaccaggatgagagtgtctggcaataggactggctttgagaccgctggtttcttgtgctagccgagtttccaggtggggtccagagggtgcaggacgggagcctcttccactccctagagccaggattccttcaggagccaggaagattggagttattgggtgggtgctaataaaaagcctggagctgaacccgatctcggtaaacaattccctttgatctttccctccggtgcacccacacagtgtgctgaaagggtcaaggctgcagctactctacctgacagttggatacaaaaacaaacaaacaaacaaacacccctctccatgatgctggtgaccacacatttactagagaggccttcatatccatctctaaatcctgaaggatggcctttaagtccacaccagttggggaagctgagctgggaggtctgaagttagtcactgcagaaaaggtgggtcaggatgtgccgttccattttaaaacaaaacaaaaacaaaacaaacaaacaaaaaaaccccttttattacatggggctggtaaggtggcttatcaggtagaggcactttcggaagtctgagaacctgagttcagtgcttagaagacacacacacacacacacaccccacaaatataaataaaggtatataaaatatttaaatttttattagacttatttagtgtgtgtgtgtgtgtgagtgtgtgtgtgtgtgagtgtgtgtgtgtgtgttttcacgtgccacagaacatgtgtggagattagaggacaatttgcaggtatctgttctcttttccaccatataggtcccaaagatcaaaaactcaggtcaccaggattagtgtagcgagcgtctctactagctaagccatcttgccagttcttgtttgtatttatctactagctaagccatcttgccagtccttgtttgtatttattttatttggagacagtgtctccactagcccaggctagactcagatgagctctgatctttctgccccatctcccaagtgctgggggtttcaaggatggtccaccactgttactctgtgctgagacaaacccagagctctgtgcatgcaaggcaagccctctaccacctgagctgcctgccaagcccagactgttcattgtatagacttgcccgctatggagtgtaaccaagcactcatgttcacagggttgaggatgtctgcagaagcactctcacaccaacagccttcctctcatctgcccctcttcatgcctgtgttggtatgcaggtggtctccatccatccccggtgtatcttcatgagcccctggctgaaggggtgagtttttaaatccacaatcatgcagagccacagcagacattaaaccaggtttgggtaggaaagtttcccggtgtggacaatgagacttctggctcttggtggacaggaagagaaacccctattggatttccagagagaacatagtccagtctgctggctgtgccaatgcagtctggaaaggagcttccaacacctggcagaggcttttccggtgccagcaacgtggaaaatggaaagctggccctgcagtgtgttttctcctgatccggggcagccactggcactctctgaacattagtcttttactctataatgtgcaagacctgttttgtgacactgggtctctttgaagtgagtgtttgggggtggcaggaacttagcaagcagcccttttgggattctgaggacactgggtctccattccagtctagaaggtcacctagtttagctatcacagtgaggactgtttacaaggggtgtgcgcatgcggcacctcatgcttttagacactaccatttcatttctacaacaaaccttcaggggaggggcaggtcctacccactttattcataagaaatggaagccgctacactgcagtggggttgagacttatccgaccaccctcccaatctgcctccttcctttccgcctgtttaaaggggccaggcagcctgggctgtgcaaaccagctgcacggggttggtgatcatatctgaccttaagcctggagatgacataagactgctagctagacagatactacactccagccacgtcgtccacgttgtcctgcccttgacaggtttatcacagattgtaactgcaaatctgtcgttacctgatttgatctttcccattaagtcaagcagggaagcggagttagtcccacgtacaaaggaagaagcaccccagagaccactaaagaggtggatgacctacagccccaggtccaccccttcaacaggcctagctcatccccatgcccagacgtccaggcacatgggacacccactaacagcagcttcttatccagctttattagggacagcatgtttaggtgagatctagggaggggtgaagacatgagaacatactttccccttaaagcaaccttcaggggccacctggcaggcctggaggggggcagcaggatggaggaacaggcacatctgcaacacagaagtctcacgactcaatagctggagttggttggtcctcagggttagaatcccagaagccggtgaacttgtcagtaaacttgctccagtagcctttcagggatctgaagtgattgtccatccagcccctggaggttaaagcagtaagaggcatccataggagagagggagagagagagagagggagagagagagagagagagagagagagagagagagagagagagagaggtgtgtgtgtgtgtgtgtgtgtgtgtgtgtgtgtgtgtgtgtgtgtgtgagaaaagctcccccgtgggcagctagacccaggactgcacgcagggctccactggctctctcagccaccagcaccaccttgcctatcacaccccaaaatcacctgcagctacctaagaaaccccaccttcatcaaggttggatcagaacctcagtgccttccatccaatctcctttcaggccggaggcaccaagcaccggggagctggatactaaggtcagctacaatgcagctgcctgtataggccatacaaatcactcccttgaggtaccccatccctggctctaagtgggtgaggcagaggcagggccagtctctcatttgaaacattactgaatgacttctaagctgtgtgatctaggccaggttatctaactctttatcatcagcaaaaccgagtatctaatatcctccccacagcctgttctggggatagagactgtcaacatcttttgctacataggcaactaaactatcaaatgtcagccaaagccattggccagggggtgatatttcatagtgggcaagatgcctacctcagactgagcccagggatagaaacagggcagactcccaccctctaacccccaacttcccacctcacttcccaccactaccccctgcatacaggcagaaaccagagcaggtaggcctcccatcgtgtgcgcaggacccagaggagaaaacctgcagcgaggctaaatgcccctcaggctgctctgaggaaaagcagagaagataggagaaggctgcttgccctgcctgtcatcttggtcacagtaccgaaaggcctcatgagggaccagaggctcgggcaggtcccaggccctggtaaacttggtggaccacagtctctgtgctagggtctcagcaccagggcatgagaggagaagacacaggaaaggaggccagtgtgcctacctggccaccacagctatatcggactcctgcacgctacttagcgcatcctggaccgtcttggaggcttgttccatgtagccctgtacagagcccagcagcaaggatccctctacctcttcagctcctgcgagagagcagagttgggccacgccagccctcagctcctgcccagccaccacttctcagggcagggccccctgaccagctcccactgaaacccagccccactcccaccatcttacgggcagatgccaggagagccaagagggccacagtgaggagcgtccggggctgcatggcacctacgtacctgtgggaaagcatctcgtgagaaggtactgtggatctgccacatctaggtcctccccttgagaatgccatgactcctgggtcatgaatcccaagcctttctcccactgatattagatagagaactacagtagacccagccccccaagtggggtggaaggtggagtatagaaatactctgcagaacgggacatctactctaatatgctgagaaacaataggtttcttttcctcgctaggactcagttttttcagtcctgggtaggcatggataccaaaggcttctaatagctcagagcaagctaaacaagggacagcatgacccaattgcaggcagctctgccactacccagtgcaaggcttttggcccatagcctccctttccccagcttctagccccccccacaccaggaacccaagggtggagaccatgagtcccaagccttctgtgggctagatggctgggtggtgagagcttctccctccagctctttgtttcttcccttccttcctctcctccccaggggcattacctggagtagctagctgcttctagggataaaactgagcaggcaagcggggagggctgtgacctgttttatattggctccaggatgggacagcgggcacagaaggcccagtgagctgggcaaaggtcacctgctgagcagtccagaccagagcctgaggcaggaaggccatgcagccatctgccagaggagttgagaaatccctctgagattgcccatgcttttcacggccacctccgccaccaagggatcagctaccggctcacctagatgaggtcggtgagacaggaaaagacaggggacaagccttggacctcaggcctgctttacagcctagagccagtgacaggctccttcacagaagccacctgaaagccttccagtagaatggaatggggaatctgtggtgccactgtggagcaacggaggaagtggggtgggagggggcagagtgaaggttacatgcccccacactgacctccacctgtgatcccaacagtctcctctgccgtagctgggcagggattagtgagagaaggacaaaggtcacatggaacccaaggccttgcccctccccaactcctccacaggcctcctcttgccctctggacctatcgttagtaatcctgagataggagcagggcccatggctgggtgatatctgacccctacatgagccctatctatgagaacctgcaagcagcaaggtatagacagggcattcacaaagaaggtgaggatgaaggaggcgctctggggcaactaagatagtcccctgagctagtactgagacccacagcctagacagcaacagaggacatcatcttctggatgcagactttggagccaagaaatcctaggtttagggttttttttggttggttggttggttggttgattttttttttctgagacaaggtttctctgtgtggccctggctgtcctggaactcactcttgtagacaaggttggctttgaactcagaaatctgcttgcctctgcctcctgagtgctaggattataggcatgagccactacctgccaaaatcctaggtttaaatgctacattcgggactagagaaataggccaattggacaaaatgctcgtcttgtaagtaggaagaccatagttcaatccccaaaccccatggacagcataagtgcagtagtgtccacttgtaatcccaagcactggggacagggagataggtagcaggccaggagttgatgtcccaccagcctagcttcttcagtgagccccagataccactgagagactctgtctcataaggcaaggtaaacagctcttgaaaaatgatacctgagccaggcagtggtggcgcatgcctttaatcccagcacttgggaggcagaggcaggtggatttctgagttcgaggccagcttgggctacagagtgagttccaggatagccagggctacacagagaaaccctgtctcaaaaaaccgaaaaagaaaaaaaaagtagaaagtagaaaaatgatacctgaaactgacctgtggcccccacagttgtgcacatcacacatgcctattgacctgcacaaacgcctaagcaactgacgcctttgaggctgacatgtagggtctgtggtcagaagttaacgggatgggacactgacttcccagcgtgtggagaaacacacagcagctggcccagggaaggactcagtttccctacctcccaaacactgacagcccagccagagacagcaggcagtttccatgcagaaacagggcttgctgcaggcagcaacctctctgaatgaaatctcagcctgagaggagcctggctttcccctcagaactcttaatctctgtctttggctgagacacgaagctcatctatcagaaatacattcttttgatataagactgttgtctggggtagctgtgatagtgtttgcttaaaagaccagcactcaggaaaatagtgttagaggtcagcctggactaaataatgtgactgtctcagaacaactcaaaacagtttgtttcctgttaaaatgtaagttgtccgaattatgtagcttagacattactaactccgtttatggctaaaaaccaaaggcccagtggggtagagactgctcaacacatgccacccagcagtggagaagctgggtctcagcacctgagctggtcctcagcacccatttatacccaagcttcctctgagaaaagtccctggcgaagctgagagggaacaaaggtggtaccagggcggggcactgtgtgtcgtggtggagggagatgccatgttcttttttcttctcagcctgtttcttgttcctaggcaaagggcacagcagggatcagatcccaatctggggtgtgatatcaagtctttggccctgagaatgatttaacaggctgactgggtcattgtccattggtagggagggtctgggaagcctgtcacctcccctgtatgtagaacatggtcactgaatcaagaaaagtcaaaagatgccaatagagagtcccagccatgcgatacttagctgcacagaaaacttaggtgtatgaatcccacagagtggttggcaggcaggtgataccttggaacctgggctctgggacttagtcccttccaaaaacccttgtaccctctcagccataggagccttatggtggcctcttggtggctttctggcctagggtcctctggggaaaggacagtgttcttgacttacagacccagtcccatggaggaaggtagcagtgggggggggggggagtttcttaatttcttttcctgttgctatgatacaatatcccgacgaaaacaaagtgaggagttatcctggctcacacatggggagccatggtggcaggaacacgaagtagccagtcacatcacgtttacaactaaaagcaaagagccatgcaaagccagtcctcagctcggctcgctttcttcattttgtgtggtctgggatccttcatccaacaacccccccccaccccctcaggtgattccagattctgtcaaattgacagttaaaactaatcaccacactgtggaagatgtcttgaacatttgggctgagaacagccctcaggagtggcttgccagccctcctctgtttggctaacagcaggttgggtggatgagagccccagggctctacttggatcctataggcagatggatggtgcacagctaccaatcagccttactagccatgagctccgtgtgagcacaggcagagactgagggtcagacagagacgtgagttgccaagaccacttgaccctctgtgcccgaggctggcataaggtggtctgctctttttccccagaagctgacacatagggttctcattttgcctcaccctctatgcaaatcaccagcagatgcatatgaagtatgccccagtcttggagaagtcaatatgatgatttatgacgcgccaggaggcaatacaacctccctgtaggggctggtgcatacgtgagtgctagccacacatgtgtgtacgatgacccagtctcttagctcagagccaacttctgaacccctggacaactcagatatctatgcatatctgacagcccgtcactggaaaccacccttgaacaaacttaggtaacacaggtcttctcagagagggtatgagtgggcaagcacctctggacctgtcccacgctgctggcacttgagagactcagtctgcaggttcaggaggtggaactgtagctgagatgtcctacgtgactcatcccccatcagttctgacctttgggcacagcacaggctggaccaggcatgattaggtaaagcaagatgaggaccaatgggtcaatggtacacagagagaaaccgtacatagctaatattcaacgaggaacctaaggggagccagactatctcacagaatcttcacaacgaagactcatccaagaccacacagcacagactgtgtgggatccacgtgcaaacacagggagtcgactccagagcctgaactcagaaaacattgaaagaccaccaagatgactcagtgaacaaagtcacccagcctgatgacatcagttaaaaccctagaacccaaatggtaggatgagagaacaaacctctccagttctcatctgacctctatacatgtattgtgatgtatacatactcacccctaccaaatattagtaaataaataacattatcactatcatcattatttttgtttgttttgttttgttttgttttgttttgttttgttttgttttgttttgagacagggtttctctatgtagccctagcttcctggaactcactttgtagactatgctgtccttgaactcacaaagatccaccaatctccacctcgtgtgtgctgggattaaaggcatgtgccatcacacctggcataaattaattttcttaaactcactaagcatggctgtgctaggaaggaatgagctcggggaagctcgagccctgtggggagccatgcagtgcagtggggcccagcagaggagcacaggtatccagctgtcttcagtcccatgagacaagctaatctggacacattttaaaaaatggatggcaacacagcaaatcagactgggcacaatcgtggtctattctaatggctgtcatttcacaaatgctgtcttgtggatggcagtcaatgggacagtatgatggatgccctcatctagtccctggtgtggtccactgaggctccacactgaccacagcctggcatcttgcctgtggatatctgctgcaattgtatgtgtggacacatgtggagtctcagtaggagacctcaaaaaactcactttccacagcagtgtctgtcaccttctgtggggggggggggggtgggaagagagagagagggagagagggagagagagagggagagagagagaggagtcactctgcatggctcttgcatatggctgagaacagtggggcagcaatcaagccttagccagccctgctctctcactgttgcctctagcccacttggtgaccctctgagggaaagggtggctctccctctgccactgtcaggagaggatcaggttctctccttccttcctgtgctgatgcacacagaaaatcattgtcattaatttcagcccttactctgggctaagctccctgcagccatctcacaagtaccacctaatttaatgtaacaaactacacattgttcaaaagagaaacttgaagcttcatgataactggacggaggtgagccagcttgacagtcatgagatacaaagcccactatgattaactcctttgatcctgggttctgatcctctcctgaccaagggtatcacagacacctcaactgaggctcactgtctgctgcagccctatgccatctctgggcctggtaccatctctgtagctgatgttctgagacaaagttcaggttggtggcagctgtcagactggtggctgtctcactggggtggaaagaggagacctggaccttgttctctcagactggcacagacccagggctgccaaccgggcctctggggcctcagttctgttcagggactcccctagactcccaggctcattcctcctgaagtttctggctatccttcccagcctcttggacagggtggagccaactcaagaagactgcttccctctgctgcctgtgtgctgtcagcttccacgttgtcttagggccactaaagtccaagaggcctcctgggagtgtgtcaccttccaacgtggagtcacactggggaggaggcggggagagagggctggaggggctttaaatgagtggctggccttgcctgcagtcaatctgcacagggacacaggtacaccgtttcttctgactccgggaaacatccagtgtagccgaaactgtcccagcccagtgaggagcccaggatgttcctgaaggctgcggtgctgaccctggccctggtggccatcaccggtgagtagacactgcacctgggaggcagcaagaaaagccagctctagaactggcggacagctcggggtggccttgtatttgcccagcagctcataggagaacaggcctttgttctccctggcacttgtgctccctgggttatcccagggatggggcaatggtttgggttatccaaactccaacattatccagctcagagctgaggcagaggggccaggagagagatgatcctcataaagttgccttctgctctctctctgcccaggcacccgggctgaggtcacttcggaccaggtggccaatgtggtgtgggattactttacccagctaagcaacaatgccaaggaggctgtagaacagtttcagaagacggatgtcactcagcagctcaggtaagtgcgatcagtctacaaggcgaggcttgaagcccatagctgacctcagaggtgggacactggctcctggagttcttctgttctcactaaaggagtcttgcctccctggacctagattgtccctgtaaacaggaaagctggacccagggatccatccctatagttccttcctatctgcatgtgctagagtttggtaaatagccaaatcccatcacaaactcttagcaggaagaggaaagagacgtgtcctgtaaggacatgaggttctgggcaaacaggggaaggagggctggtattttgggggacccactgagcacatgcaaggacatcagaccctgtgccactggaagacatgtgttgcacaatgtgaccctgggaggggagtgatgccaaagtccagccccattctttatccacaggtaaggaaagcaaacttctcaagtcacatggtgggcagataaggatgcagaggctcagcagaagccttgcagataaaactccaaagtcaaactaatcctaggagatttcctgaaagcatgacctaccccaggggagggtcaaagggacaagacggaggtctctgttcccatggacacactcctgacctaagcaggtgtatagagctgagtgttctacaagcgtatctaatggtgcttccttgtctccatcctttccctgaagtaccctcttccaggacaaacttggggatgctagtacgtatgctgatggggtgcacaacaagctggtgccctttgtcgtacagctgagtgggcatctagcccaggaaactgagagggtgaaggaagagatcaagaaggagctggaggacctacgtgaccgcatgatgccccatgccaacaaagtaaccc

SEQ ID NO: 618 - DNA, 25837 bp, Mus musculus
gggttactttgttggcatggggcatcatgcggtcacgtaggtcctccagctccttcttgatctcttccttcaccctctcagtttcctgggctagatgcccactcagctgtacgacaaagggcaccagcttgttgtgcaccccatcagcatacgtactagcatccccaagtttgtcctggaagagggtacttcagggaaaggatggagacaaggaagcaccattagatacgcttgtagaacactcagctctatacacctgcttaggtcaggagtgtgtccatgggaacagagacctccgtcttgtccctttgaccctcccctggggtaggtcatgctttcaggaaatctcctaggattagtttgactttggagttttatctgcaaggcttctgctgagcctctgcatccttatctgcccaccatgtgacttgagaagtttgctttccttacctgtggataaagaatggggctggactttggcatcactcccctcccagggtcacattgtgcaacacatgtcttccagtggcacagggtctgatgtccttgcatgtgctcagtgggtcccccaaaataccagccctccttcccctgtttgcccagaacctcatgtccttacaggacacgtctctttcctcttcctgctaagagtttgtgatgggatttggctatttaccaaactctagcacatgcagataggaaggaactatagggatggatccctgggtccagctttcctgtttacagggacaatctaggtccagggaggcaagactcctttagtgagaacagaagaactccaggagccagtgtcccacctctgaggtcagctatgggcttcaagcctcgccttgtagactgatcgcacttacctgagctgctgagtgacatccgtcttctgaaactgttctacagcctccttggcattgttgcttagctgggtaaagtaatcccacaccacattggccacctggtccgaagtgacctcagcccgggtgcctgggcagagagagagcagaaggcaactttatgaggatcatctctctcctggcccctctgcctcagctctgagctggataatgttggagtttggataacccaaaccattgccccatccctgggataacccagggagcacaagtgccagggagaacaaaggcctgttctcctatgagctgctgggcaaatacaaggccaccccgagctgtccgccagttctagagctggcttttcttgctgcctcccaggtgcagtgtctactcaccggtgatggccaccagggccagggtcagcaccgcagccttcaggaacatcctgggctcctcactgggctgggacagtttcggctacactggatgtttcccggagtcagaagaaacggtgtacctgtgtccctgtgcagattgactgcaggcaaggccagccactcatttaaagcccctccagccctctctccccgcctcctccccagtgtgactccacgttggaaggtgacacactcccaggaggcctcttggactttagtggccctaagacaacgtggaagctgacagcacacaggcagcagagggaagcagtcttcttgagttggctccaccctgtccaagaggctgggaaggatagccagaaacttcaggaggaatgagcctgggagtctaggggagtccctgaacagaactgaggccccagaggcccggttggcagccctgggtctgtgccagtctgagagaacaaggtccaggtctcctctttccaccccagtgagacagccaccagtctgacagctgccaccaacctgaactttgtctcagaacatcagctacagagatggtaccaggcccagagatggcatagggctgcagcagacagtgagcctcagttgaggtgtctgtgatacccttggtcaggagaggatcagaacccaggatcaaaggagttaatcatagtgggctttgtatctcatgactgtcaagctggctcacctccgtccagttatcatgaagcttcaagtttctcttttgaacaatgtgtagtttgttacattaaattaggtggtacttgtgagatggctgcagggagcttagcccagagtaagggctgaaattaatgacaatgattttctgtgtgcatcagcacaggaaggaaggagagaacctgatcctctcctgacagtggcagagggagagccaccctttccctcagagggtcaccaagtgggctagaggcaacagtgagagagcagggctggctaaggcttgattgctgccccactgttctcagccatatgcaagagccatgcagagtgactcctctctctctctccctctctctctccctctctccctctctctctcttcccaccccccccccccccacagaaggtgacagacactgctgtggaaagtgagttttttgaggtctcctactgagactccacatgtgtccacacatacaattgcagcagatatccacaggcaagatgccaggctgtggtcagtgtggagcctcagtggaccacaccagggactagatgagggcatccatcatactgtcccattgactgccatccacaagacagcatttgtgaaatgacagccattagaatagaccacgattgtgcccagtctgatttgctgtgttgccatccattttttaaaatgtgtccagattagcttgtctcatgggactgaagacagctggatacctgtgctcctctgctgggccccactgcactgcatggctccccacagggctcgagcttccccgagctcattccttcctagcacagccatgcttagtgagtttaagaaaattaatttatgccaggtgtgatggcacatgcctttaatcccagcacacacgaggtggagattggtggatctttgtgagttcaaggacagcatagtctacaaagtgagttccaggaagctagggctacatagagaaaccctgtctcaaaacaaaacaaaacaaaacaaaacaaaacaaaacaaaacaaaacaaacaaaaataatgatgatagtgataatgttatttatttactaatatttggtaggggtgagtatgtatacatcacaatacatgtatagaggtcagatgagaactggagaggtttgttctctcatcctaccatttgggttctagggttttaactgatgtcatcaggctgggtgactttgttcactgagtcatcttggtggtctttcaatgttttctgagttcaggctctggagtcgactccctgtgtttgcacgtggatcccacacagtctgtgctgtgtggtcttggatgagtcttcgttgtgaagattctgtgagatagtctggctccccttaggttcctcgttgaatattagctatgtacggtttctctctgtgtaccattgacccattggtcctcatcttgctttacctaatcatgcctggtccagcctgtgctgtgcccaaaggtcagaactgatgggggatgagtcacgtaggacatctcagctacagttccacctcctgaacctgcagactgagtctctcaagtgccagcagcgtgggacaggtccagaggtgcttgcccactcataccctctctgagaagacctgtgttacctaagtttgttcaagggtggtttccagtgacgggctgtcagatatgcatagatatctgagttgtccaggggttcagaagttggctctgagctaagagactgggtcatcgtacacacatgtgtggctagcactcacgtatgcaccagcccctacagggaggttgtattgcctcctggcgcgtcataaatcatcatattgacttctccaagactggggcatacttcatatgcatctgctggtgatttgcatagagggtgaggcaaaatgagaaccctatgtgtcagcttctggggaaaaagagcagaccaccttatgccagcctcgggcacagagggtcaagtggtcttggcaactcacgtctctgtctgaccctcagtctctgcctgtgctcacacggagctcatggctagtaaggctgattggtagctgtgcaccatccatctgcctataggatccaagtagagccctggggctctcatccacccaacctgctgttagccaaacagaggagggctggcaagccactcctgagggctgttctcagcccaaatgttcaagacatcttccacagtgtggtgattagttttaactgtcaatttgacagaatctggaatcacctgagggggtgggggggggttgttggatgaaggatcccagaccacacaaaatgaagaaagcgagccgagctgaggactggctttgcatggctctttgcttttagttgtaaacgtgatgtgactggctacttcgtgttcctgccaccatggctccccatgtgtgagccaggataactcctcactttgttttcgtcgggatattgtatcatagcaacaggaaaagaaattaagaaactcccccccccccccactgctaccttcctccatgggactgggtctgtaagtcaagaacactgtcctttccccagaggaccctaggccagaaagccaccaagaggccaccataaggctcctatggctgagagggtacaagggtttttggaagggactaagtcccagagcccaggttccaaggtatcacctgcctgccaaccactctgtgggattcatacacctaagttttctgtgcagctaagtatcgcatggctgggactctctattggcatcttttgacttttcttgattcagtgaccatgttctacatacaggggaggtgacaggcttcccagaccctccctaccaatggacaatgacccagtcagcctgttaaatcattctcagggccaaagacttgatatcacaccccagattgggatctgatccctgctgtgccctttgcctaggaacaagaaacaggctgagaagaaaaaagaacatggcatctccctccaccacgacacacagtgccccgccctggtaccacctttgttccctctcagcttcgccagggacttttctcagaggaagcttgggtataaatgggtgctgaggaccagctcaggtgctgagacccagcttctccactgctgggtggcatgtgttgagcagtctctaccccactgggcctttggtttttagccataaacggagttagtaatgtctaagctacataattcggacaacttacattttaacaggaaacaaactgttttgagttgttctgagacagtcacattatttagtccaggctgacctctaacactattttcctgagtgctggtcttttaagcaaacactatcacagctaccccagacaacagtcttatatcaaaagaatgtatttctgatagatgagcttcgtgtctcagccaaagacagagattaagagttctgaggggaaagccaggctcctctcaggctgagatttcattcagagaggttgctgcctgcagcaagccctgtttctgcatggaaactgcctgctgtctctggctgggctgtcagtgtttgggaggtagggaaactgagtccttccctgggccagctgctgtgtgtttctccacacgctgggaagtcagtgtcccatcccgttaacttctgaccacagaccctacatgtcagcctcaaaggcgtcagttgcttaggcgtttgtgcaggtcaataggcatgtgtgatgtgcacaactgtgggggccacaggtcagtttcaggtatcatttttctactttctactttttttttctttttcggttttttgagacagggtttctctgtgtagccctggctatcctggaactcactctgtagcccaagctggcctcgaactcagaaatccacctgcctctgcctcccaagtgctgggattaaaggcatgcgccaccactgcctggctcaggtatcatttttcaagagctgtttaccttgccttatgagacagagtctctcagtggtatctggggctcactgaagaagctaggctggtgggacatcaactcctggcctgctacctatctccctgtccccagtgcttgggattacaagtggacactactgcacttatgctgtccatggggtttggggattgaactatggtcttcctacttacaagacgagcattttgtccaattggcctatttctctagtcccgaatgtagcatttaaacctaggattttggcaggtagtggctcatgcctataatcctagcactcaggaggcagaggcaagcagatttctgagttcaaagccaaccttgtctacaagagtgagttccaggacagccagggccacacagagaaaccttgtctcagaaaaaaaaaatcaaccaaccaaccaaccaaccaaaaaaaaccctaaacctaggatttcttggctccaaagtctgcatccagaagatgatgtcctctgttgctgtctaggctgtgggtctcagtactagctcaggggactatcttagttgccccagagcgcctccttcatcctcaccttctttgtgaatgccctgtctataccttgctgcttgcaggttctcatagatagggctcatgtaggggtcagatatcacccagccatgggccctgctcctatctcaggattactaacgataggtccagagggcaagaggaggcctgtggaggagttggggaggggcaaggccttgggttccatgtgacctttgtccttctctcactaatccctgcccagctacggcagaggagactgttgggatcacaggtggaggtcagtgtgggggcatgtaaccttcactctgccccctcccaccccacttcctccgttgctccacagtggcaccacagattccccattccattctactggaaggctttcaggtggcttctgtgaaggagcctgtcactggctctaggctgtaaagcaggcctgaggtccaaggcttgtcccctgtcttttcctgtctcaccgacctcatctaggtgagccggtagctgatcccttggtggcggaggtggccgtgaaaagcatgggcaatctcagagggatttctcaactcctctggcagatggctgcatggccttcctgcctcaggctctggtctggactgctcagcaggtgacctttgcccagctcactgggccttctgtgcccgctgtcccatcctggagccaatataaaacaggtcacagccctccccgcttgcctgctcagttttatccctagaagcagctagctactccaggtaatgcccctggggaggagaggaaggaagggaagaaacaaagagctggagggagaagctctcaccacccagccatctagcccacagaaggcttgggactcatggtctccacccttgggttcctggtgtggggggggctagaagctggggaaagggaggctatgggccaaaagccttgcactgggtagtggcagagctgcctgcaattgggtcatgctgtcccttgtttagcttgctctgagctattagaagcctttggtatccatgcctacccaggactgaaaaaactgagtcctagcgaggaaaagaaacctattgtttctcagcatattagagtagatgtcccgttctgcagagtatttctatactccaccttccaccccacttggggggctgggtctactgtagttctctatctaatatcagtgggagaaaggcttgggattcatgacccaggagtcatggcattctcaaggggaggacctagatgtggcagatccacagtaccttctcacgagatgctttcccacaggtacgtaggtgccatgcagccccggacgctcctcactgtggccctcttggctctcctggcatctgcccgtaagatggtgggagtggggctgggtttcagtgggagctggtcagggggccctgccctgagaagtggtggctgggcaggagctgagggctggcgtggcccaactctgctctctcgcaggagctgaagaggtagagggatccttgctgctgggctctgtacagggctacatggaacaagcctccaagacggtccaggatgcgctaagtagcgtgcaggagtccgatatagctgtggtggccaggtaggcacactggcctcctttcctgtgtcttctcctctcatgccctggtgctgagaccctagcacagagactgtggtccaccaagtttaccagggcctgggacctgcccgagcctctggtccctcatgaggcctttcggtactgtgaccaagatgacaggcagggcaagcagccttctcctatcttctctgcttttcctcagagcagcctgaggggcatttagcctcgctgcaggttttctcctctgggtcctgcgcacacgatgggaggcctacctgctctggtttctgcctgtatgcagggggtagtggtgggaagtgaggtgggaagttgggggttagagggtgggagtctgccctgtttctatccctgggctcagtctgaggtaggcatcttgcccactatgaaatatcaccccctggccaatggctttggctgacatttgatagtttagttgcctatgtagcaaaagatgttgacagtctctatccccagaacaggctgtggggaggatattagatactcggttttgctgatgataaagagttagataacctggcctagatcacacagcttagaagtcattcagtaatgtttcaaatgagagactggccctgcctctgcctcacccacttagagccagggatggggtacctcaagggagtgatttgtatggcctatacaggcagctgcattgtagctgaccttagtatccagctccccggtgcttggtgcctccggcctgaaaggagattggatggaaggcactgaggttctgatccaaccttgatgaaggtggggtttcttaggtagctgcaggtgattttggggtgtgataggcaaggtggtgctggtggctgagagagccagtggagccctgcgtgcagtcctgggtctagctgcccacgggggagcttttctcacacacacacacacacacacacacacacacacacacacacacacacacctctctctctctctctctctctctctctctctctctctctctctctccctctctctctctctccctctctcctatggatgcctcttactgctttaacctccaggggctggatggacaatcacttcagatccctgaaaggctactggagcaagtttactgacaagttcaccggcttctgggattctaaccctgaggaccaaccaactccagctattgagtcgtgagacttctgtgttgcagatgtgcctgttcctccatcctgctgcccccctccaggcctgccaggtggcccctgaaggttgctttaaggggaaagtatgttctcatgtcttcacccctccctagatctcacctaaacatgctgtccctaataaagctggataagaagctgctgttagtgggtgtcccatgtgcctggacgtctgggcatggggatgagctaggcctgttgaaggggtggacctggggctgtaggtcatccacctctttagtggtctctggggtgcttcttcctttgtacgtgggactaactccgcttccctgcttgacttaatgggaaagatcaaatcaggtaacgacagatttgcagttacaatctgtgataaacctgtcaagggcaggacaacgtggacgacgtggctggagtgtagtatctgtctagctagcagtcttatgtcatctccaggcttaaggtcagatatgatcaccaaccccgtgcagctggtttgcacagcccaggctgcctggcccctttaaacaggcggaaaggaaggaggcagattgggagggtggtcggataagtctcaaccccactgcagtgtagcggcttccatttcttatgaataaagtgggtaggacctgcccctcccctgaaggtttgttgtagaaatgaaatggtagtgtctaaaagcatgaggtgccgcatgcgcacaccccttgtaaacagtcctcactgtgatagctaaactaggtgaccttctagactggaatggagacccagtgtcctcagaatcccaaaagggctgcttgctaagttcctgccacccccaaacactcacttcaaagagacccagtgtcacaaaacaggtcttgcacattatagagtaaaagactaatgttcagagagtgccagtggctgccccggatcaggagaaaacacactgcagggccagctttccattttccacgttgctggcaccggaaaagcctctgccaggtgttggaagctcctttccagactgcattggcacagccagcagactggactatgttctctctggaaatccaataggggtttctcttcctgtccaccaagagccagaagtctcattgtccacaccgggaaactttcctacccaaacctggtttaatgtctgctgtggctctgcatgattgtggatttaaaaactcaccccttcagccaggggctcatgaagatacaccggggatggatggagaccacctgcataccaacacaggcatgaagaggggcagatgagaggaaggctgttggtgtgagagtgcttctgcagacatcctcaaccctgtgaacatgagtgcttggttacactccatagcgggcaagtctatacaatgaacagtctgggcttggcaggcagctcaggtggtagagggcttgccttgcatgcacagagctctgggtttgtctcagcacagagtaacagtggtggaccatccttgaaacccccagcacttgggagatggggcagaaagatcagagctcatctgagtctagcctgggctagtggagacactgtctccaaataaaataaatacaaacaaggactggcaagatggcttagctagtagataaatacaaacaagaactggcaagatggcttagctagtagagacgctcgctacactaatcctggtgacctgagtttttgatctttgggacctatatggtggaaaagagaacagatacctgcaaattgtcctctaatctccacacatgttctgtggcacgtgaaaacacacacacacacactcacacacacacacactcacacacacacacacactaaataagtctaataaaaatttaaatattttatatacctttatttatatttgtggggtgtgtgtgtgtgtgtgtgtcttctaagcactgaactcaggttctcagacttccgaaagtgcctctacctgataagccaccttaccagccccatgtaataaaaggggtttttttgtttgtttgttttgtttttgttttgttttaaaatggaacggcacatcctgacccaccttttctgcagtgactaacttcagacctcccagctcagcttccccaactggtgtggacttaaaggccatccttcaggatttagagatggatatgaaggcctctctagtaaatgtgtggtcaccagcatcatggagaggggtgtttgtttgtttgtttgtttttgtatccaactgtcaggtagagtagctgcagccttgaccctttcagcacactgtgtgggtgcaccggagggaaagatcaaagggaattgtttaccgagatcgggttcagctccaggctttttattagcacccacccaataactccaatcttcctggctcctgaaggaatcctggctctagggagtggaagaggctcccgtcctgcaccctctggaccccacctggaaactcggctagcacaagaaaccagcggtctcaaagccagtcctattgccagacactctcatcctggtttacagcactagtgttctgagcctctgtggggcccttttggggttccttgttgctttgcctggccatccatttcccttggagccttcttaggaagggattctgtctcataccctgaaccagccaggtgcccagcttgagtgagcgttaagagctgagtagtcgcgtacaaaggaatccccagtgcggcaccatgttctcacgtcccttgatgtccccttagcgcccgccctatgtcccccaaagaaagaagctattccattttggaaaggtttattgtaagaaagccaatgcgggggtggggagtggaagcgggcacctcactgggcagtcagagtctcgctggccttgtcgatcacactctggacttgggtcttaagcgtctccagcatgggcatcagactatggcgcaggtcctccagcgcaggtctggctttctcgccaagtgtcttcaggtgggttttggccctggtgtggtactcgttcaaggtagggttgctcttgagctcagccaggcgctgggccaggctctcgcgcatctgttcgctgtggggcgctagctgtgtgcgcagagagtctacgtgtgtgcgcatgcggtcgcgaaattcctcagccacaggggacagtctcccttgcagctcctgcagcttctggcgcgcgctctcctgcagctcggcgcccagaggcgccaccttctggcggtagagctccacatcctctttccatttcttctggaattcgtccaggtagggctgcaccttctgtttcacttcctctaggtccttgttcatctcctgtctcacccaatctgtttctttctccaggttatcccagaagtcccgagtcaatgggcccagccgttcctgcagctgactaacggttgaacccagagtgtcccagttttccaggagattcaggctagagggggaagagagcggctgagagacgagcccaggcatcatgcgctgcccctggtctgcagatccatgcacatgatagctgggtgccacctgtcccctaatgtgcagttgctatggtcctagtttccccgaacatgcaaccctctaactcactgccttccctttacattcctctgtacacatggcggaaggcaccaagaacacagatgtggtcggtgctggttacaaggccagtcccgttttttgttttttgttttgttttgttttgttttgggtgctgtctgaccagtactgggggttaccaaggaaaagggatttggcactcataggctgaatgaggggctgtggttacccaacagccagatgaatcccatccctagtcctccactggaacctgccatggtgcccagctggtaggaaagcccgtgaagggctagccagctcagttccagcatcttctcactggtctctctgcccaccctggatgggcagcccttgacctgctccaggccccacgctaggtctttccttacttcagctgttggcccaaggaggaggattcaaactgggacacatagtctctgccgctgtctttgaccgcatccacatacacattagcgaaatccttcactttgtcccattgggactggggttcatcttgctgccatacgtgccaagcctggctccctggggatggaggggagacccatgttaggttagactcggagtcagggaagagaacagtgggaattctgttctctgtgcccaggaaggtagtcccacgcaggtcaagaggcacctacctgtcaggaagaccagagccacggccagcaccacagctttcatcctgaagggtgtgggtgacctgaagaagaagaaggaggaggagggctgggctgaagggaggcattgtcatggaaaggctccacacacaattcaagcccatggaagcattggctagaatggctaaaggtgcgagatatccacggtattgatttggacagtggagcatcaactgggaggcgctatggagccagagccaccgaaggcaggtagcagcacttacctccccggagctctccgacagtctgggtgtccagctcttcttccctggtctatatatgtgtgtgggcaggggctgggctgggagactgataagctcagcctggccctgccactgcttacttttgctggcgatgtggaacttagagttcaaggatcagctctgttcctgaggctgggcaaacagagtgggcaaacaggaaactgcgggggctgccgagctgggatcaagggttcaggtgggggcagcagggggtggctgcagactccaggggtccccaggggtaaggcagttgcaccatcccgaggtgtatgtcttcttcaagatagtctcatggagcccactcctggactcctctgtgttgctagtgccctctgagcctggaacaagggagggagggaggaattgtgggctccttcactcacagccccaccccaaagttttttttttgctttccaaggggttccccctttcacctcaccctggtcccccaggtttggggatttgtctttccagatgccacatgtttagccagcctcccaaccctaaatccaaaaacaactgaggtgtcagcctgagtgagatgcagacaggctcatatccccaagctgaggatgaagacccctctgatgcttcagaagaaatgacagaggccaacatggagttgttagctccttccttgtctccctccctccttccctcccttcctttcttccttatcttaggtacatgagcgctctgtcttcagacacaccagaagatggaatcagattcctttacagatggttgtgagccaccatatggtttctgggaattgaactcaggacctctggaagagcagctagtggtcttaaaccgctgagccatctctccagccccagttgccaatgtttttgttatgtgtagatgctgttattcagcctcccttccagagaaaacctcaccatataccatgaccactaaaaggggtcatgtagttcagtgacgatatgtcttcccagagtggtgagggcctaggctcacttgccaggatgggagagctgggtagctgtgtagagtgggctgagtacggtggccagtttttgcacttggaaggtcagagggttgagagttcaaaaccacagccttgcccatatagcaagtttgaagtcagcctgggctatatgagaatatctaaaaacaaaacaaaacaaaacaaaacaaacaaacaaacaaaaaccacagatcatctctaaaatcccattatggaaagtgagttttcaagctaagaggaacttttgagaccatctatttgaggttctaccatgaacttccttctagataagggcctgttgagagtggaaggaatttgctgtgtcctttatctctcagccttagaggcaaggatggaccttgcgcccaggtctctgcatttgggacccagggcaggaatgtactctgcccatctccctaggaaactccccaactccctagaaaccagcttggaatctgtctaccagttcagggagtggctgggattccaggctgctcccatcccaggaggctttgcaaccagagagaaccttggttctgggatctgcaacttattctccaggtgacccggacaggttacataacctctccgtccctgggtctcttatctgctaaggaaagataatgacagagcatgccacagcttccttatgatcccagtcactgtatgggaagcaaaatggaaaagatgtgtgtgcacttactaagtccaggaacctgtgcgtggtgtctaacatggcaaatgtgattaggggacttgaactcaagggtagcctgggatatccagagggcacagtaatcacaagggtctctcaatatgctagaggaggcagaagggccaaaaccatggagaaacttgagaacagaaatagagaccaagcaatctgagtgtgcagatgagccaagcgggtttcggctacccatccatgggtgctggaagagagaagagaaaatgcaggttttctctgaatgaaagagttttcagacagaatatcactctgacaatcccatgcttttagccatgatttgagcttctgaactccagagttttatttgtgttgtgttgtctgtgaagtctgaacacatttcaagcaaaactgctgaaaggtgaccaacagcaaatggcaagtgttctgcatcccagactcctgaggtcactgccacgaacacattctgttactaggccatagcctgtgaccccagttgctggcagcaaaaatggggtaaggcaggtgtctggcttgcaggtgctgtgatgcaggacatcttttccaggttgaaaccagcccccgagggctgtgggagcactcagagggaggtggcctccacaggagtagttttttaggtcttttgggggtggggtgggggtgggggtgtctgttggtttccaggatgcttcccacagtcctatctttctttctggctcgttactgaaaccgtgctggctaatcctaattgaacctaacatttgctccgcaactcatttaaagtaaacttgagacacccctgtaaggctggacgccatgttcacccccttggtagtttgcctgtcagaaaaaacggcagctcagagatgctaagaacattcttgccccccagctttgagacagtgcccaaggggctagggatcgggtccggcctctagttctctgatggtgatttcttcacttccaaagcctttgtactctctccagggacatggcttggggactggaatccatgacatcacggtagacgactctgggacaacctgactgagcaataagtgtgctcctgtcttggtatatagtccaggctggtctcaaacttgtggtaatcctcctgccttggctttctatgctaaggttataggtgtatgctccatgctccctcccccacaccccatacttacttgctagtgacttactttatcaggagacatttggtttaaactagtctaaatagctacttactgttctgaacaggaagtctttctggacagatcaagagtcaaatgggctcatcacagattgagacaggttggctgctgttagaggtgttgggtgaccagggagtgaagatagtgcctatcattggcatttctctcactacccttcaccccctcatcttgggaacctccaaagtgactcctggattggaccagcaagtgctggcctgggatcccgggagtgctggtagcttcagcagcagcgaatgtagcccatttcacaacttctgtctcagcacagatcacctgcacagggcagtgcaaggactctgtcctttagtgggactggcaccagagacaccaaacatttactaaatgaataacattgatacaccaaagcttctcagactggcaaagggtcacagaaaggcgcaggccttcaatggtgccagccccttctgggaatatgtacccaacaaggggtagtgctagcaggaatggggagccagggctggggagggtctccctaagcagactggatccccagtgattcctgtttggaaggacactgtcatcagctctgaatgatgttcctgcctcctgctcaggagactaaagtctccgtggttaagtgggtggggcctggctccagtacaaagtcaggaagtctttctttccttcttggagggcagagatgtccaggttcagatcccagagtcaatctggctgcctctgggtacctacccgacctctagccaaaaactttgcagacacagcatcagtgaaaggtgtcctgaccttttgggagtccttagggcccatcactggttccaaagccagctcacctctgtgcggtgcgtacaccttcaagacctccaggggctgagaaggcaccttccactctgagcagtttcattgcaattctagcctcaaaggctttcttatatgcgcctctccctgcctaaagagttttctatctgtatgagtgtatgttatctgtacacaggagcctgggaagcatgtcgggtccttggaattggagttctgtgtggtgtgagttgcaggaagttggtgctcttaaccactgagccatccttccagcctctgtcactctttctacaaatctccgtattccccagatcattgatcttttttctcgtgtgacttcagctctttcagcagagcctggggccctgttggaaattctgccctccacctggaatccaggaacagacattgggaaacagtaccaaaagcccttctgtcctacagctgagggaggccacctcataaaggttccagccagggtcaatgcaaggctctccttctgaggaccccaaggaatccttttcccacccaactctgcaaacacaaatgtgtcccttctgaggggttagagtccacacggatgcctggacacagtgtgagtctgatttgccaggttcagaggccaaaaggcaaggtgagaatgtgctgctccaagccccaccctaagtctggggacttctccagacacctgggtcacctctgcccctaccccatgtgattctctcaattagactctgaaccgtaaggcaaacaacatatcagcgttagtacataatcaggtttttatttccacaacctcctacagtccaaccaagtcactaagttgtagatgtcccacacaaacaaggacaaaagctcttagcaacttgaatctggagattattattattattatcatttttagatcaacagaaatgagaaaggaaaaatacttcttacattttcaaagaacagaaatagcaaagtagattcatatacattcaacatatactgcgcatattggttactacaatataaagcaatggtgatcttgaaaatagttcgcaagatggcacggttaataggctcactggctttcgtctgggtggctctggagggtggtgcctgctcttccatcaatccagtaccacgtaaacaggtcaggctgagcgtggggagcagcagggcggggctggagtatcagagctggactgagcttggaagctgacaatggcttgtcaagctttcttgggagtcagacatcttctggctagtaattagtgacacctgaagtggaggggaaattggaggacatgggaccacgaaacaggtccccagccaagctctcacattgaaaacaaatccattcaagagacaatggatttgttcaaagaggcaagctttcagggttggtgcggaaggataaaatggctagggaccctgctggtaatgtccagatgccatggcaggcagcggctttcttctgtgcatactcagaggttggtggcccctggctctcagaaatgagggctgggagtcagagcagggaccatccctctctggttttgaagaccagaagagaagccgggccggcctcgtttggccccagactttggtttctgactgcagagagaaaggaagtgacaaggacagtagccactgcctatgtgctgcttcggctggggaagggaggccactgcatccgctgctggcacaggagagtggctcacgatgccaaagccaaggaaaacacttcaaacagaagttgcaagccacagttcaacagcacagaatctggttaaacatttctcttttaaacaaataaacaaaatcctttttgtctttattaataataacaataataacaataatatcaacatttatcaaaaacaattcctacatgatcaagaattaaaatataggggccgaggatgctggggagaggagaaggttaagagacccagtacagcctccaattcttgtctgtgacaaagaggccgcagggaagggcatgtacacactcatacgtgtgcacacaaatggaccaacggccctttttacaacgcagtagagaataagaatggagatcacacaaacagcacagtgcaccactcctgggtgttcactcatgagggggaaccagttggtgactggaggggaactggaccacacaccagaggggcctacactgagctattctggatggcaaaccttcagcaccaggccatccggcctgtgctgggatctgatggaattctgctgggccagataggattctagtagaggccagcaggagattctgccagatcccaggctcagttttttcttctgttccaatctccaaaggcaggggccactgccccctcctctccttttcttggccaccaagctccggtctagcatttgttcctggtagaccggggcagagggagagagtctggtctgagacaggctgtggaagggagggtcctgaggttcagcccctgaatactaacctctggttcatctacctcagaaatggtaggtgaaaacgagaggggggggggaatatgctcaagggggtaggggtgggcaaggcaaagagaataagttatctccaaaggaaaatttccaaaacaaaacacaagcaaacctcctaacagcagaactcaactcaagcacaccagatgctggctcatgaaagatggaggacactgatttcctgtttatttccttggtgccttggtcatacaagcaaacatggcaaatgtccctcgcaacccaagcgccggcctactggtgcctagtgtaggggaaggagctgcactgttgtggtggagacacagacggaggagcggtgcggcgctgttggacactgttggtctattggtctagactcagcctcctcctggagctgtactcgaacctacgaagcagacaagaacaccttgaaggagagggacatgacttcaccctttctccccaccctttctaatggtactagggctgggactcagggccctatgtgtccatgccctgctctgtcagtgagccacaggcatgcaggctctcagtgaagtcttttcttggtgtcactgtatgagtcttgccacactgaggctctgccatgcctctgcctgtggctttaccttcctcaagttgttctgtctctgtagagatagagccactagtactcaccatccatgtgacctctgctaggccaacagggccggtgagccttctgtcttttcagcatgggtttaccccctaaaaagtccagctggggctggggctggggttgaggctggggctggggcttacacggccctgggttctatgcttagcaccaaaatgccaaaaccaaacaataaaaaccaccagtgaaggagcctgactggatctgctctttttcccttttctggttgggtttcactcttcaggatggagtgtaaagactagctttagagagctggccaaaggtcattggcctctggcctctgcaactgtagcttggatctcattaaagccatagcatctataacatgaggtgggccatgtacctcttccctaaattaaagtcctcagcccacctcaaaactaacacagtacttaatgaagaaacaggcagacggggaaggttgcacaaaaagagtgtcgctcaagtttagtggggtaccacacaaggaatgaacacattgaggctatgaggggctggcactgggccccagggctgcctgggcctgagcagggtggcactcactttccatatcttgctacacgccggcttgctccatgctgaaggagacctctgggtgcttgtggctgagcatgatgtctgtaacacacgtagctggatagcgagaggagttgagatgctggctgccatcacccaggcctggatgctcgtggcccaggctcaccccacattctgcaagaccaaaaagaacatgtgaggtggaggtgggggagcaagtgggacaggagagaggaggctggggaggtcttgtctagcaacccagcctgagtccagctctgactcaggccacagcaggcccttcagatgttagggacccttcctgaccacctgccccttcctttcgccaccctcatgagcaactgacatatgggggtgaagatgaaaaacccttcaagagccttttcttgtggttagggggcaggataactgtagtgagtgctataggagccaggccaggccactttctcttgagcatcacactaataaacactaataaacctcaggaggccagcatccttaggacccaagccaggacatgggcactgctctcttgatgtcctcacaggtgaagacttgggatgaagacttcctaggctttgcctgtggaccttagaaagggtgaacctgtccgtctccaggctctatcatggtctcccaccctggctctacaaagacatagaaataaatgttctacaaggatatgaagccctctaaggagaagctgaaagagggctattgttgaaggtacatcctgctccagcactgaacttggactgtgatgtccctgtgctgacagaagccagagcccctaacgtgtgcacatgtgcgtagcacctcagccagtgaacaatttccacagaagactgccccggggtgcccatgggcaaggccttaccttcatcttcctcatcctgaaactgttggctgcccatgagtgaagactgactaagaactgcatctgacatccgggcagagctcagcgccttgcctgccaccaggctcattcctggcaaggtatccagctgtacctgtagagtggaaccagcagcaatgagtgacagacagtgtgtcactctcaggggacccctgtccctccccaacccatctatagacagtgaggtctaacagttctgttctcaagtgcccatgtaacatggtgactgctgtgtgtgtgaagtgtaactgttatttactaccgcagaactaaatttctaattttgtgtaacttaaacacatttacatttgaacagccacaaatggttgcctgaaggcatacaggtgctaccatggctgggtgtgtcccagttgacaagacttgctctgacaggtcaactcttaagaaagccaaagaaagcaaaacagttgccaggaatggaccaaaaattgagggttcatatattgaagcctggatttagatttctgggagaggtcaagaccctggatgtcagatcatttgattcctaagtctaacatatggccgcaagactctcctgttaatgctggtctgttatggggagtcaaagaaaaaaaaaaggtctccacagcttgcagagggctggactgaggagatggcggcagaaggggacactctgctttcaggttgagatggcaccatcccacctctaagcagcaggaggggccaacatacataggcatcgtcgctgttctggatcgtgtggtgtctctggagcgtccgggacctgaggtgctcactgactaagggccgtactgggtacccaaggccgttgtgatccggcagctccattgcttgtccaggagaacttctttccaggcagttccctaggacagactctaggagacagagcaagagtagcagggtgagcaggcccagagcttctccaggtgacaggtgacgccaactcccatgtagccccttgtaagacacaatgagtgagaggggagggaccacatttgcccaaatgccaatgctcagtcagctggcatgggtgttagaggagctggggccagcctaacaacatcaaatcctacagcaaataggggtttaagacactccttaccctagaaggaaaaatccacctatggggtgtgagctgggccatacccatcttcttctttccccatcactctgctggcttagcttgtgctcagctcctgattgagctcatggagagctctagagatgaggggcttctggcctgtatccatggccttggcctctgccttagtgccatcccaggtctctcccactgtcccacggccactgctggtgctgcctatggctccttcacctttcataagtgcttgcacacagctgtgcctgacctcactccccatgcccattttgacatcatctaggtccatggcttcagccacactgctcatgtactgcagtggatggaatgagccagatgttcagtgaagagaggcacttgtcatcaggcttgatgacctgagttgtatcctcagaacccgcctagtaagagaaatgatcacacacacacacatactcatacatatgtgcacacacatgtacacacacacacacacacacacacgcacatgcacacgcacacacacactaaatgtaaacggagttactgaaatcctttttttttttttttggttccagatccatagatccaactttttttcttggttatcttactagtatgtaacacttacgttaaatttcaaactcattaacttccccagaagcctgctactcctttaagagcccttgtttggcaccgcctcccttcccccaatctttgaggtgtaagttcctggagtcatgcttaattccttcttcccggccccacagcggctaagtctaaagagtccgctcgttcagtggtggacacctcagcccccagactgcctgcttccagtcaagggacagtatctcttgcctagatcattttctaaccacccctagttacttccctataaaggccacactttaaaaaaaatcccgttcctactttttttttttttttggttttttcgagacagggtttctctgtatagccctggctgtcctggagctcactttgtagaccaggctggcctcgaactcagaaatccacctgcctctgcctcccgagtgctgggattaaaggtgtgcactaccacgcccagctcctacttttaaaatatatgcatatgtgtgcatgtcacagtacatgcaaatgagtacatgtgtacacatgtggtatatgtggtgcatgtgttgtatatatgtagtgctctgtttccatcccttgtttagagattgaaaacatttaaacaattgttagctgtgtacatgggtacacacgcgctatggcatgtatgtggagttatggcatgtatgtggaggtgagggacaactttcaggagttggctttctcttccctttctaaggctcaaactcaggtcatgggggtttactctctgccacctctgaccttgggccgagactttaaggcctgtgatcaatcaggagcagatggcaagcgcctctcttcactaacagaatcttgatatttccaccccactccctcttccagaccagcactctccccccatgtgttttcctgtctgttaaattctctttctccccttttggatttttttttttagacctgaaaatgaggtttctccaaatctaagctcccacccaggcttttcaaaggtcttgtgggctccacttcccttctgtgccctcctgtctgctttcctgagtgatgttcccaggcctcaggtcacaagaggctatcacttgaccagctctcctgagtgcccagctgagggctcacttctctgtcaggtggaggtggcaaaggtgccacaggcaccgccggggtgggaagactcagcttgattctagcttcattgcttcctgaggaggtggaagggaacttgagcgaggtggcggatctttctggacctgtgcctctggagcctaccccacaggctgctgatagacagagcaggacaataaacaagtaagttacccaatttttagttaccagggtagcagcctttggtctgaaagaagcaaatgagattataaaccagatccagggctgaggtcacagctctgcagtggaatgtttgcctagagagtgtaggaccatgtttgagccttaagcatcacaagaccccccgcagtagaggaaaatgaagtgtctcccactcagaagctgtgctgggaagggctagagaggaacctgggaagggttagagagggccctgtgaggatcttggctgttgcctaaaggctcccatgttgagacttggtcatcagtatgtggcgctaagaagatataatggaacttttaggaggcaaagcttgataaagggaagttagggtggggccgctgagatgattcagccataaacgcatctgccatcaagtctgatgacctgagttcaatccctagggcccataggtgggagaagagaactgactcccctcaactgtcctgagcgcgcgcgcgcacacacacacacacacacacacacactccctccctccttctcccttttgggagtgacaggatggctcagcgagtaaaggtgcttaccctaagcctgagtttcatccctgggaccaacagagtagaaggagagaacagaacacaa

SEQ ID NO: 619 - DNA, 38 bp, Homo sapiens
tcacccagcccctaaatcagtcaggggaagcaacagag

SEQ ID NO: 620 - DNA, 37 bp, Homo sapiens
atgttttcttccagaggtgatatactttctttttttt

SEQ ID NO: 621 - DNA, 45 bp, Homo sapiens
aatacttccatatggagcatttttcagagttttctaacccagtct

SEQ ID NO: 622 - DNA, 56 bp, Homo sapiens
attatatttgagtttctttcagatcatttaggatactcttaatctcacttcatcaa

SEQ ID NO: 623 - DNA, 46 bp, Homo sapiens
cggttcttgtggaattgtgccctaagtgttgtcaaggaggggagat

SEQ ID NO: 624 - DNA, 46 bp, Homo sapiens
attcggaaactgggcctcgtgaagtatggagaaaaatatgctggta

SEQ ID NO: 625 - DNA, 42 bp, Homo sapiens
tgcccttttgagaggagtcccagagaaagaagttggcaaggt

SEQ ID NO: 626 - DNA, 46 bp, Homo sapiens
catgggctactgccctcagtttgatgccatcacagagctgttgact

SEQ ID NO: 627 - DNA, 25 bp, Homo sapiens
tatacgatgtgttaaaaccaagaaa

SEQ ID NO: 628 - DNA, 45 bp, Homo sapiens
aatgcaaagctatctcctctgaatgatgaagatgaagatgtgagg

SEQ ID NO: 629 - DNA, 36 bp, Homo sapiens
gtgtctgacttatgccaggcataggtgattcagaga

SEQ ID NO: 630 - DNA, 45 bp, Homo sapiens
gcaaaagggagagaaccctagccattatggaattactgctttcaa

SEQ ID NO: 631 - DNA, 45 bp, Homo sapiens
gcagatcgatttctcaacagcttgggaagatttatgacaggactg

SEQ ID NO: 632 - DNA, 46 bp, Homo sapiens
tttccctgggtgtcagtaatactcaagcacttcctccgagtcaaga

SEQ ID NO: 633 - DNA, 47 bp, Homo sapiens
gctgacgtgtaacttctctgaggcaaaatttagccctcctttgaaca

SEQ ID NO: 634 - DNA, 24 bp, Homo sapiens
cttaaagaacaagatctgggtgaa

SEQ ID NO: 635 - DNA, 42 bp, Homo sapiens
aacaaaacactgcagatatccttcaggacctgacaggaagaa

SEQ ID NO: 636 - DNA, 23 bp, Homo sapiens
gtcctgagccattttttttttct

SEQ ID NO: 637 - DNA, 48 bp, Homo sapiens
cttccagaatgggaactggacaatgcagaacccttcacctgcatgcca

SEQ ID NO: 638 - DNA, 46 bp, Homo sapiens
aattggagagggggcaaacttgactttcaagtttcaatgggaagat

SEQ ID NO: 639 - DNA, 46 bp, Homo sapiens
taaacgccctcaccaaagaccctggcttcgggacccgctgtatgga

SEQ ID NO: 640 - DNA, 46 bp, Homo sapiens
agctttcttcagtcctgaaagatttgtagacctgtagatgggggaa

SEQ ID NO: 641 - DNA, 51 bp, Homo sapiens
ccaccctttggcaagtaccccagcctggaacttcagccctggatgtacaac

SEQ ID NO: 642 - DNA, 30 bp, Homo sapiens
accataaataatgacaacatagagatagtt

SEQ ID NO: 643 - DNA, 54 bp, Homo sapiens
gtggaagagactgctaattgccagacggagtcggaaaggattttttgctcaggt

SEQ ID NO: 644 - DNA, 62 bp, Homo sapiens
ggcaaagggtcctaccaggtgaaaggctggaaacttacacagcaacagtttgtggccctttt

SEQ ID NO: 645 - DNA, 67 bp, Homo sapiens
gcagagctgtcttcgcccgttcactgaagatgatgctgctgatccaaatgattctgacatagaccca

SEQ ID NO: 646 - DNA, 46 bp, Homo sapiens
attcctcaaggtggccgaagagagtggggtggatgctgagacctca

SEQ ID NO: 647 - DNA, 79 bp, Homo sapiens
ggagcaggattatcatggagttagtcattgagtttttaggtcatcgacatctgattaatgttggccccagtgagccatt

SEQ ID NO: 648 - DNA, 78 bp, Homo sapiens
atctcagagacgaccctggaagaagtaagttaagtggctgactgtcggaatatatagcaaggccaaatgtcctaaggc

SEQ ID NO: 649 - DNA, 46 bp, Homo sapiens
tctctgagaagcacgtgaaggcggagatggagcagatggccctgga

SEQ ID NO: 650 - DNA, 52 bp, Homo sapiens
tcgggcaccgcctacatcctgggaaaagacattcgctctgagatgagcacca

SEQ ID NO: 651 - DNA, 46 bp, Homo sapiens
aggtggctgtcgatggcctggcactgaatttttatgagggccagat

SEQ ID NO: 652 - DNA, 38 bp, Homo sapiens
caaagagataagaactaactaatttaatactagttacc

SEQ ID NO: 653 - DNA, 45 bp, Homo sapiens
aacaataatcagaaggatatatattgttgcaggttagactgtctg

SEQ ID NO: 654 - DNA, 50 bp, Homo sapiens
gcccctcttcatgacgctggcctggatttactcagtggctgtgatcatca

SEQ ID NO: 655 - DNA, 42 bp, Homo sapiens
ggagcaggcaatcatcagggtgctgacgggcaccgagaagaa

SEQ ID NO: 656 - DNA, 37 bp, Homo sapiens
tttattgtatggttctaaaggaatggttgattacctg

SEQ ID NO: 657 - DNA, 45 bp, Homo sapiens
catgtcaagtacaagatccgaatggacattgacaatgtggagagg

SEQ ID NO: 658 - DNA, 70 bp, Homo sapiens
gttggacagcagggacaatgaccacttttgggaacagcagttggatggcttagattggacagcccaagac

SEQ ID NO: 659 - DNA, 48 bp, Homo sapiens
aatcattatgctgccattgaaataataaatacaaaggcgcaagggggg

SEQ ID NO: 660 - DNA, 45 bp, Homo sapiens
ggcagagaccagggaggaggctctccaagtggccaaggcataaag

SEQ ID NO: 661 - DNA, 78 bp, Homo sapiens
ctggggctggagagaaaggcatgggcatgccttggagggacttgtgtgtcaagctgaggacctttactttaagctcta

SEQ ID NO: 662 - DNA, 45 bp, Homo sapiens
aagaatgagataatggcagaaggacaaatcctgcaagatctcact

SEQ ID NO: 663 - DNA, 48 bp, Homo sapiens
tctcgtattgtctgcgggcatcccgagggaggggggctgaagatcaag

SEQ ID NO: 664 - DNA, 64 bp, Homo sapiens
ggaactgtacctgattgagatagttcagcatggagcagatatagctgtggggagtttgatggga

SEQ ID NO: 665 - DNA, 35 bp, Homo sapiens
gtccttaaagcgtctgtgtgggtttttgcaggaga

SEQ ID NO: 666 - DNA, 84 bp, Homo sapiens
agaccacactatttagcttacttagtaataacattgcaaagaaaaattccgacgaagttttttcagcctaggaatcaatagttc

SEQ ID NO: 667 - DNA, 45 bp, Homo sapiens
ttgatgggaagatggatatctatttatgtttaaaaacccatcata

SEQ ID NO: 668 - DNA, 26 bp, Homo sapiens
ttatgataacgtttctccactgtccc

SEQ ID NO: 669 - DNA, 44 bp, Homo sapiens
agtgctgctttttctgttttgttgcactggattgaagccttttc

SEQ ID NO: 670 - DNA, 107 bp, Homo sapiens
gagtatgtgtgagtcagcattcagagtacttaacacacttagtgtcattagtgataacttaacccacacgtataggaagctagacctccatttacagaaaaatggag

SEQ ID NO: 671 - DNA, 43 bp, Homo sapiens
gtgaatatggtaaaacttgtgagagtagtttgtaaatgattga

SEQ ID NO: 672 - DNA, 46 bp, Homo sapiens
gccttgtttggttttccttgaactattaacaggaagatagggagat

SEQ ID NO: 673 - DNA, 45 bp, Homo sapiens
atgttaaaaggttgggactccaaacagttctgttaaagcttagag

SEQ ID NO: 674 - DNA, 46 bp, Homo sapiens
gaagccagcaacagaaacagatgatttcaggagctccaggaaaatg

SEQ ID NO: 675 - DNA, 50 bp, Homo sapiens
agtacctggggaaattgagatgagggagtcctggctcagctgggagaaaa

SEQ ID NO: 676 - DNA, 23 bp, Homo sapiens
ttctgtaaaatgtgtataacaag

SEQ ID NO: 677 - DNA, 38 bp, Homo sapiens
agaagaaagggcagggaaaaggttttccgtgcttagcc

SEQ ID NO: 678 - DNA, 47 bp, Homo sapiens
ggggaacctgaattctgaggtctctagtgagagaacagggactggaa

SEQ ID NO: 679 - DNA, 53 bp, Homo sapiens
tctgggattccagtatgccatttccatcctcagtgtttttggccacctgagag

SEQ ID NO: 680 - DNA, 97 bp, Homo sapiens
gtatgtaaggaagttcagggaatagtataagtcactccaggcttgaggcaaaatttacaaatgctgctgactttgtatgtaaggggaggcattttct

SEQ ID NO: 681 - DNA, 57 bp, Homo sapiens
gtgagcactggactctatgttcaggtgctgaggagctggcaaaaggttttaagtcgg

SEQ ID NO: 682 - DNA, 48 bp, Homo sapiens
acaagagaactcaccagtgaagtcccagtggtaggagagcgtgcagca

SEQ ID NO: 683 - DNA, 100 bp, Homo sapiens
ttacgacaagccaggacccttttgcatactaaggaaaacagggatgaaggaaacagaaatggtctctgctctgactcagaaggtagaaatcctctttccc

SEQ ID NO: 684 - DNA, 48 bp, Homo sapiens
ccaggagtgctgccacccttgaattctgacaccctatttctcctatcc

SEQ ID NO: 685 - DNA, 41 bp, Homo sapiens
gcagcgcctcctggccggaggacctaggaatcggccggctc

SEQ ID NO: 686 - DNA, 55 bp, Homo sapiens
acagtcccggactgtgaatccgggaactcgagttggaggtgtcccaaacggtccg

SEQ ID NO: 687 - DNA, 46 bp, Homo sapiens
ctcagaggggtcgggggttcccgggcgtgctgagggcgctgctgcc

SEQ ID NO: 688 - DNA, 48 bp, Homo sapiens
gatccggagccccacatccccaccacttgcaactcagatgggaccgga

SEQ ID NO: 689 - DNA, 41 bp, Homo sapiens
cccttctctcccgggctgcggcagggcagggcggggagctc

SEQ ID NO: 690 - DNA, 4038 bp, Homo sapiens
ctgtaatcccagcactttgggaggctgaggtgggcgtatcacttcaggccaggagtttgagaccagcctggccaatatggtgaaaccctgtctctactaaaaatacaaaaaaaatcagctgggcatggtggcttgcacccgtaatcccagctactaggaaggctgaggcaggagaatcgcttgaacctgggaggcagaggtcacagtgagccgaaatcatgccactgcactccagcctgggcgacggagcaagactccagctaaaaaaaaaaaaaaaaaaaaaagagtgtgtggcctggcactcaagttcacatgggtgtgcaggcatgcctgtgtattctcacatgacctccctgctcacggtccctccttgcactcatgtctgaatgtccccgcgtgcacgcacatggcttcacagatctgggcagtgccttccctaccctctctctgcagggccttttgccccctcatgcaggcccctggataatcggccccatccccatgtccccatctccagtgtatcttagctaccctaggtaaaggagtgggctttttagttcctaaccttccagagctacaacagcagtcatccagccaggtctgggtgggaacattttctagatacgggtgctgagatctctcagcccagagagaagccctggggaattttcagagagaaagcagtctccaggtggggctggatgtactgatgccactgagatctgtaaaggagtccctaacacctgacataggagtgacaaaactgttttctgcaccaactgagcagaatacacgcagctgacctgggctcaaggtctggccctgccacgtgctggctctgtgatgctggccaagtgccttcgcctctccgggccacagttttttgatctgaagagtggagccctactcaagccatctgcagctctcgggctctctgacctgacatctttcgggtggtggggacacaaaggaagcagcctctattgggagaccttgtgcttctttttggtcccaggacactgccccccaccactccagtccgggtcccaagggcccagtcagctcaactgtaatcatgacaacattgatcaagcatctttacgtgcaggtgctgtgccaaacggttcgaacgctctctcatttcaatctcacggcaaacctacggtggagggggtacggttgtatccactttacatgtaagaaactgaggctgatatcaagtggtggagccaagaatagtgcctcgttgcatcttactccaacctctagcccatccggcctcctcccttcacgtgcgcctaagagggctagggggcctggataggggaggtcagctccacagttttgagtaaacacacacagtctcaactctgatgacaacttaagtgccaggcatagtggctggcatggggcacacactcaagtcatgttgtgcagcacctaacagtttatcaaagtatcagcaaacttattgtcctgtttgaccttccgcacaaagctgtcaaggaaggcagggtacggagggtgattcctaccttagagatgaagaaactgaggcccagagactgcccagctaccagaaggtggatagagcgctggcctccatgcctgcctgacctggagtctgtccagtgcccacccacagaacagcctcggccctttcccatgcccagacacagatggcacacttgcgacggcccactcatagcagcttcttgtccagctttattgggaggccagcatgcctggaggggggccaggcatgaggtggggtaggagagcactgagaatactgtcccttttaagcaacctacaggggcagccctggagattgcaggacccaaggagctcgcaggatggataggcaggtggacttggggtattgaggtctcaggcagccacggctgaagttggtctgacctcagggtccaaatcccagaactcagagaacttgtccttaacggtgctccagtagtctttcagggaactgaagccatcggtcacccagcccctaaatcagtcaggggaagcaacagagcagggcatgagaactcctctgtaggcaaccatgggacccacacccatgtccccactggacgacaccagtcaggaccacaccaccctctcaacttcactggacgacagccctgagacctcaggcaggaatcccccacagctgccaccctgggagaagagatatccttgcaggaaccccagcacaagtcaaaccctgccatctccaggtcacctcagatgtttatgcccctgggcctgaggcacaaagtgacagggtggggagatgtgaaaggtcaaggctgtcattgttttctgtgcaaacagcaccgcctggagttgcacaacctggtggctctgagcagggtaggacagagggaggcagcctctcatttggaaagtcattggaggattgattagttgtgtgatctggggcaggtcacctaatcgctctgagcctcaattttctcatctgcaaagtgagaaaataacacctaccccaaagccggttctggggactaagaatgtttatgaacacctctgctatgccagctaatgccagtcagggtgaggtggagaagggagtaggggagaggagagtactgatgggcaggggcaggatgggagaggaaggacacacttctgctcacactggccccaggtcttagaacaaagcagaagcactcacgggcttgaattgggtcaggtggggcctcccaaggcaaacccctagcccaggggtccccaacccccaagtcatagataggtactggtccatggactgttaggagccgggctgcacagcacgaagtgagtggtgggtgagtgagcaataccgcctgagctccgcctcctgtcagatcaagtggccttacattctcataggagtgtgaaccctattgtgaactgcacatgccagggatctaggtggagggctccttatgagaatctaatgcctgatgatctgaggtggaacagcttcatcccaaaaccatccccgctggcccatggaaaaattgtccaccacaaaactggtccctggtgccaaaaaggctgaggaccactgctctagccagaccttcagaaaaggaaaatggggccaggcgcagtggctcatgcctgtaatcccagcactttgggaggccgaggcaggaggatcccctgaggtcaggaattcaagaccaacctggccaacatggtgaaaccccatctctgctaaaaatacaaaaattagctgggtgtggtggcgcgtgcctgtaatcccagctacttgggaggctgaggcaggagaatgggttgaacccgggagacggaggttgcagtgagccgagatggcaccactgcactccagcctaggtgacagagggagactccattaaaaaaaaaagaagaagaaagaaagagagaaaggaagagagggaaagaaagaaaaaggaaagaaagaaagaaagagaaagaaaggaaagaaagaaagaaaggaaagaaagaaaggaaagaaagaaaggaaagaaagaaagaaagaaagaaagaaagaaagaaagaaagaaagaaagaaagaaagaaagaaagaaatagaaagagaaagaaagggaaaggaaaggaaaatggaaatgagggctaaaacggcacgccctaggactgctccggggagaaaggagggacctgggaggaatgcagtctcaactctgtcatctctcccgcagcagcctgacaaaggccctgtgaggaaagaggaggctgaagaggcacaggcccaggggaggctggagcacctccattccattgttgggatctcaccagggcaggggcgggtgggaatggaggcagctggcaggggggatggggagggaggccagcgggtgtacctggcctgctgggccacctgggactcctgcacgctgctcagtgcatccttggcggtcttggtggcgtgcttcatgtaaccctgcatgaagctgagaagggaggcatcctcggcctctgaagctcctgaggaaagagcagggctgagtggggtggatcggc

SEQ ID NO: 691 - DNA, 4037 bp, Homo sapiens
actggtcttccctgagtgtgggtgtgtaaaggaggtgtggcttctggccagatggcacagggctctcccattcctgtctctcatctctgtgatgatatgccttcaatcactttttccagttctgcttagagggcatcaggtcctaatggcacatttctacctcttcttggagccagtcaagggagggtgtcataacaaataataggcgtaggccttgggcggggcaggtctgccaccagtcccaaggctgtccttttcaggctctgcaggtgaggcacttggctttctggaccccgagatcctcatctgtaaagtggcaaaaacgatagagcctttatcctacattgtgccctgagggctggctggcttagtgagtatcaagtgcttagcacagtgtctggaagacagacagtgcccaggaatgggtgcctgcaggcagtaaaattattctccctttcactctttaagaggtgatcctttctgaaggagtcctctatcttctctcacactacagtagttgatcttacctaaggatgggaaagggtaaaggaaaagggaaaaaagcagaacaggtagaggagaatataggaagaatcttggcccccgcccatcgtcactcaacaccttgagggcctgctgtgagctagaattcagggctgggagtcaggctgtgggatgctcgacaggttgccttcaattcctcctctctctcccccttgctctcctagtcccccagttccctgccaacctcatacgttctttttggtcttgcagaatgtggggcaagcctgggaggtcatgagcacccagacctgagtgatggcagccagcatttaaactcctcttgctatccatctacgtgtattacagacattctgctcagctacaagcaccccgaagtctccttcagcatggagcaggcaggcgtgtaacaagaaacagagagtgagtgtcaccctggccagagccaaaccagccctgtggcccagtgcctgctcccaatcccatcaggagcttcagcccatgtgttgtggtggccagtgcagtcgacagtaccacgcctcccctcgtggccttcacagtttcttgcttttcattaacgacgctgctagttttagggcgcgaggtaggggtgggggtgtgcagaagaaatgctaaacacagtctcttggttcggttatgggaataagacacaagactcgccgtgtgttacaggtgctctagccttcatagcgacagaagtgagctacggctccagaggatgcaggtgacctccggtcagcataatgaggaaaggaggaagtccttaaactcagtcctaaaagacaaaacctggcaggaaaatatgtccagccatattttttaaggccatacagaagcaagtggcaggatattccagattagggaaatgtgtgatgagaggcccatggtagaaagaatggggaaattggcttgtttggctggagtaatgcaaagagtacacagcaggcaccattggttgtatctggaaaatccttgacagaagaggcctgatgaaagggaagccacttggcaaatccacatcagagcctcagtatggcaagctacctgaacacctgagggaaagtaaacccgttgcattttttaaaaggttttaaatggaatatttgagcctttctcttttcaaactaattctcctctgtgtctgctttattccaggttttgtgtacagcttgggaatgaaaaggttgattgtaaacccacagtatctagcagcgttgtgccaaattgcccttgtgtttctctccacccaaaatatcacagctgctttcctcacatttggttcatccgtgtgctgttcttttgggttctgagagggttttgccatgtttgcttgtatgaccaagtcaccaaggaaataaacaggaaggaaatccatgttctccatcttttgtgaaagtatatttgagttggtggttttttgttttgtttgggggtttgtgttttgttttgtttttggtatgttttcttccagaggtgatatactttcttttttttcttcctttcttttttttctttcgttccttttttgaaacaggagagcaaagcagttagagttcagaggccagcggcctcagggccactccctccctagccttcatcagcagagcaccctccatccccctgcattgctcttctgtgaaagcaaatactaaaggatgccatcctctggaatcctaatggcaggcaaagggagagaggaagggtgacggcttctggcacttagaaaacaaaaagaacaaaaaaagagaaacccccaagcctggaacgcagagaggtctttactgctgggatccacggaaaacatgtctgtcctagccaagatcatatgaagagtttggcacggaggctgagaatgacctggcatagatggtttgccagttaggatgtctcaatttgagcctttgcttttggtggataactcagctcccctcttgtaacctggaaagttggttgcctttatcatcctgctggttttatccatggactgaacacccaacagcagtgcactatgctttctatggcatctttcattctcattttatattgtgctataaaaaggattgtttctccatatatatattatatatgtgtgtatatatataatataatatatgtgtatatatatattatatatataatatataatataatatattatatatatattatatatataatatatatataaaatatatatatatatgctctcctctttcagcctctttgtcacagggaagaagtgtaggaggttgccttgggccctgcctctctcctaacctcctcttccccactgggtaccctcagcccctatattttaattcttgatcatgtagaaattgtttttggtaaatgttgatattattgttattatcattattaataaataaagagaaaaggaatttttgtttaaatgagaaatgtttaaccagattctgttctatttgaattgtgacttgcaccttttgttcaaagtatttcctttaggcattgtaattgtgaacagctcttacttgtgccagtgacagatgcagtggtctcctttccccagttgaagcagtgcatacgcagtagctattatttgtgttatctttatttctcttcattgttagaaaccaaagtcttctctgctggctggggctgagagagggtctgggttatctccttctgatcttcaaaacaagagagagaccttgaatacactgactcttccaccctttttttttctgggaaaggagagcaagaggtcccgagtcccctcctagtctttcatcctgaatttgcacagaggaaagcgggtgcccggcatggccatcctgatgttgctggcgggatccccatgcaccttgtccttctccactgatactggcagctcggctcctggacccaagatcccttgagtggaattctgcagtgcaagagcccttcgtgggagctgtcccatgtttccatggtccccagtctcccctccacttggtggggtcaccaactactcaccagaagggggcttaccaagaaagccctaaaaagctgttgacttatctgcgcttgttccaactcttatgcccccaacctgccctaccaccaccacgcgctcagcctgatgtgtttacatggtactgtatgtatgggagagcagactgcaccctccagcaacaacagatgaaagccagtgagcctactaaccgtgccatcttgcaaactacactttaaaaaaaactcattgctttgtattgtagtaaccaatatgtgcagtatacgttgaatgtatatgaacatactttcctatttctgttctttgaaaatgtcagaaatatttttttctttctcattttatgttgaactaaaaaggattaaaaaaaaaatctccagactcaagttgctaagaccttttgtcctgccttttgtccttccttttgtgaggcacttacttacaacttggttacttagttggacagcaggaagttgtgtagataggagcctgattgtgttcttag

SEQ ID NO: 692 - DNA, 4045 bp, Homo sapiens
aagtattcttccctccttcacacacagttttctagttaatccatttatgtaattctgtatgctcctacttgacctaatttcaacatctggaaaaatagaactagaataaagaatgagcaagttgagtggtatttataaaggtccatcttaatcttttaacaggtatttgtgaactttgccaaggaccaaagtgatgatgaccacttaaaagacctctcattacacaaaaaccagacagtagtggacgttgcagttctcacatcttttctacaggatgagaaagtgaaagaaagctatgtatgaagaatcctgttcatacggggtggctgaaagtaaagaggaactagactttcctttgcaccatgtgaagtgttgtggagaaaagagccagaagttgatgtgggaagaagtaaactggatactgtactgatactattcaatgcaatgcaattcaatgcaatgaaaacaaaattccattacaggggcagtgcctttgtagcctatgtcttgtatggctctcaagtgaaagacttgaatttagttttttacctatacctatgtgaaactctattatggaacccaatggacatatgggtttgaactcacacttttttttttttttttgttcctgtgtattctcattggggttgcaacaataattcatcaagtaatcatggccagcgattattgatcaaaatcaaaaggtaatgcacatcctcattcactaagccatgccatgcccaggagactggtttcccggtgacacatccattgctggcaatgagtgtgccagagttattagtgccaagtttttcagaaagtttgaagcaccatggtgtgtcatgctcacttttgtgaaagctgctctgctcagagtctatcaacattgaatatcagttgacagaatggtgccatgcgtggctaacatcctgctttgattccctctgataagctgttctggtggcagtaacatgcaacaaaaatgtgggtgtctccaggcacgggaaacttggttccattgttatattgtcctatgcttcgagccatgggtctacagggtcatccttatgagactcttaaatatacttagatcctggtaagaggcaaagaatcaacagccaaactgctggggctgcaagctgctgaagccagggcatgggattaaagagattgtgcgttcaaacctagggaagcctgtgcccatttgtcctgactgtctgctaacatggtacactgcatctcaagatgtttatctgacacaagtgtattatttctggctttttgaattaatctagaaaatgaaaagatggagttgtattttgacaaaaatgtttgtactttttaatgttatttggaattttaagttctatcagtgacttctgaatccttagaatggcctctttgtagaaccctgtggtatagaggagtatggccactgccccactatttttattttcttatgtaagtttgcatatcagtcatgactagtgcctagaaagcaatgtgatggtcaggatctcatgacattatatttgagtttctttcagatcatttaggatactcttaatctcacttcatcaatcaaatattttttgagtgtatgctgtagctgaaagagtatgtacgtacgtataagactagagagatattaagtctcagtacacttcctgtgccatgttattcagctcactggtttacaaatataggttgtcttgtggttgtaggagcccactgtaacaatactgggcagcctttttttttttttttttaattgcaacaatgcaaaagccaagaaagtataagggtcacaagtctaaacaatgaattcttcaacagggaaaacagctagcttgaaaacttgctgaaaaacacaacttgtgtttatggcatttagtaccttcaaataattggctttgcagatattggataccccattaaatctgacagtctcaaatttttcatctcttcaatcactagtcaagaaaaatataaaaacaacaaatacttccatatggagcatttttcagagttttctaacccagtcttatttttctagtcagtaaacatttgtaaaaatactgtttcactaatacttactgttaactgtcttgagagaaaagaaaaatatgagagaactattgtttggggaagttcaagtgatctttcaatatcattactaacttcttccactttttccagaatttgaatattaacgctaaaggtgtaagacttcagatttcaaattaatctttctatattttttaaatttacagaatattatataacccactgctgaaaaagaaaaaaatgattgttttagaagttaaagtcaatattgattttaaatataagtaatgaaggcatatttccaataactagtgatatggcatcgttgcattttacagtatcttcaaaaatacagaatttatagaataatttctcctcatttaatatttttcaaaatcaaagttatggtttcctcattttactaaaatcgtattctaattcttcattatagtaaatctatgagcaactccttacttcggttcctctgatttcaaggccatattttaaaaaatcaaaaggcactgtgaactattttgaagaaaacacaacattttaatacagattgaaaggacctcttctgaagctagaaacaatctatagttatacatcttcattaatactgtgttaccttttaaaatagtaattttttacattttcctgtgtaaacctaattgtggtagaaatttttaccaactctatactcaatcaagcaaaatttctgtatattccctgtggaatgtacctatgtgagtttcagaaattctcaaaatacgtgttcaaaaatttctgcttttgcatctttgggacacctcagaaaacttattaacaactgtgaatatgagaaatacagaagaaaataataagccctctatacataaatgcccagcacaattcattgttaaaaaacaaccaaacctcacactactgtatttcattatctgtactgaaagcaaatgctttgtgactattaaatgttgcacatcattcattcactgtatagtaatcattgactaaagccatttgtctgtgttttcttcttgtggttgtatatatcaggtaaaatattttccaaagagccatgtgtcatgtaatactgaaccactttgatattgagacattaatttgtacccttgttattatctactagtaataatgtaatactgtagaaatattgctctaattcttttcaaaattgttgcatcccccttagaatgtttctatttccataaggatttaggtatgctattatcccttcttataccctaagatgaagctgtttttgtgctctttgttcatcattggccctcattccaagcactttacgctgtctgtaatgggatctatttttgcactggaatatctgagaattgcaaaactagacaaaagtttcacaacagatttctaagttaaatcattttcattaaaaggaaaaaagaaaaaaaattttgtatgtcaataactttatatgaagtattaaaatgcatatttctatgttgtaatataatgagtcacaaaataaagctgtgacagttctgttggtctacagaaatttacttttgtgcatttgtggcaccacctactgttgaagggttataaagccattagaaaagtagaggggaagtgatttggatcaaaaggaaaaactttagaaaagattcaaatgttcccttaatcataaaagagaactgaggggactacttgaaaataaaaggttgttttgtattttcatgttggttaagatactgagtaactggtattaagtgttagaggtttttagataaatattctgcttaatgattatgaagctgcactgagatttctgaaaatgctctgtagctgagcttatttaataaatgttcacttggtataggggaagctacaaaggcagccttcagtgtccttttgtttattcaaccaaaaatataaggacacaatgtagcagttatactgggaaggtgctgggggtggtggcaatggt

SEQ ID NO: 693 - DNA, 4056 bp, Homo sapiens
aagtaccaaataggtcctgacacttaagaagtactcagtaaatattttcttccctcttccctttaatcaagaccgtatgtgccaaagtaaatggatgactgagcagttggtgatgtaggggtggggggcgatatagaaagtcagtttttggccgggcgtggtggctcatgcctgtaatcccagcactttgggaggctgaggagcaggcagatcatgaggtcaggagatccagataatcctggccaacagggtgaaaccccgtctctactaaaaatacaaaaattagctgggcatggtggtgcgcacttgtagtcccagctacttgcgaggctgaggcaggagaattgctcgaacccaggaggtggaggttacagtgagccaaggtctcgccactgcactccagcctggggacagagcaagaccccatttcaaggggggaaaaaaagtctatttttaagttgttattgcttttttcaagtattcttccctccttcacacacagttttctagttaatccatttatgtaattctgtatgctcctacttgacctaatttcaacatctggaaaaatagaactagaataaagaatgagcaagttgagtggtatttataaaggtccatcttaatcttttaacaggtatttgtgaactttgccaaggaccaaagtgatgatgaccacttaaaagacctctcattacacaaaaaccagacagtagtggacgttgcagttctcacatcttttctacaggatgagaaagtgaaagaaagctatgtatgaagaatcctgttcatacggggtggctgaaagtaaagaggaactagactttcctttgcaccatgtgaagtgttgtggagaaaagagccagaagttgatgtgggaagaagtaaactggatactgtactgatactattcaatgcaatgcaattcaatgcaatgaaaacaaaattccattacaggggcagtgcctttgtagcctatgtcttgtatggctctcaagtgaaagacttgaatttagttttttacctatacctatgtgaaactctattatggaacccaatggacatatgggtttgaactcacacttttttttttttttttgttcctgtgtattctcattggggttgcaacaataattcatcaagtaatcatggccagcgattattgatcaaaatcaaaaggtaatgcacatcctcattcactaagccatgccatgcccaggagactggtttcccggtgacacatccattgctggcaatgagtgtgccagagttattagtgccaagtttttcagaaagtttgaagcaccatggtgtgtcatgctcacttttgtgaaagctgctctgctcagagtctatcaacattgaatatcagttgacagaatggtgccatgcgtggctaacatcctgctttgattccctctgataagctgttctggtggcagtaacatgcaacaaaaatgtgggtgtctccaggcacgggaaacttggttccattgttatattgtcctatgcttcgagccatgggtctacagggtcatccttatgagactcttaaatatacttagatcctggtaagaggcaaagaatcaacagccaaactgctggggctgcaagctgctgaagccagggcatgggattaaagagattgtgcgttcaaacctagggaagcctgtgcccatttgtcctgactgtctgctaacatggtacactgcatctcaagatgtttatctgacacaagtgtattatttctggctttttgaattaatctagaaaatgaaaagatggagttgtattttgacaaaaatgtttgtactttttaatgttatttggaattttaagttctatcagtgacttctgaatccttagaatggcctctttgtagaaccctgtggtatagaggagtatggccactgccccactatttttattttcttatgtaagtttgcatatcagtcatgactagtgcctagaaagcaatgtgatggtcaggatctcatgacattatatttgagtttctttcagatcatttaggatactcttaatctcacttcatcaatcaaatattttttgagtgtatgctgtagctgaaagagtatgtacgtacgtataagactagagagatattaagtctcagtacacttcctgtgccatgttattcagctcactggtttacaaatataggttgtcttgtggttgtaggagcccactgtaacaatactgggcagcctttttttttttttttttaattgcaacaatgcaaaagccaagaaagtataagggtcacaagtctaaacaatgaattcttcaacagggaaaacagctagcttgaaaacttgctgaaaaacacaacttgtgtttatggcatttagtaccttcaaataattggctttgcagatattggataccccattaaatctgacagtctcaaatttttcatctcttcaatcactagtcaagaaaaatataaaaacaacaaatacttccatatggagcatttttcagagttttctaacccagtcttatttttctagtcagtaaacatttgtaaaaatactgtttcactaatacttactgttaactgtcttgagagaaaagaaaaatatgagagaactattgtttggggaagttcaagtgatctttcaatatcattactaacttcttccactttttccagaatttgaatattaacgctaaaggtgtaagacttcagatttcaaattaatctttctatattttttaaatttacagaatattatataacccactgctgaaaaagaaaaaaatgattgttttagaagttaaagtcaatattgattttaaatataagtaatgaaggcatatttccaataactagtgatatggcatcgttgcattttacagtatcttcaaaaatacagaatttatagaataatttctcctcatttaatatttttcaaaatcaaagttatggtttcctcattttactaaaatcgtattctaattcttcattatagtaaatctatgagcaactccttacttcggttcctctgatttcaaggccatattttaaaaaatcaaaaggcactgtgaactattttgaagaaaacacaacattttaatacagattgaaaggacctcttctgaagctagaaacaatctatagttatacatcttcattaatactgtgttaccttttaaaatagtaattttttacattttcctgtgtaaacctaattgtggtagaaatttttaccaactctatactcaatcaagcaaaatttctgtatattccctgtggaatgtacctatgtgagtttcagaaattctcaaaatacgtgttcaaaaatttctgcttttgcatctttgggacacctcagaaaacttattaacaactgtgaatatgagaaatacagaagaaaataataagccctctatacataaatgcccagcacaattcattgttaaaaaacaaccaaacctcacactactgtatttcattatctgtactgaaagcaaatgctttgtgactattaaatgttgcacatcattcattcactgtatagtaatcattgactaaagccatttgtctgtgttttcttcttgtggttgtatatatcaggtaaaatattttccaaagagccatgtgtcatgtaatactgaaccactttgatattgagacattaatttgtacccttgttattatctactagtaataatgtaatactgtagaaatattgctctaattcttttcaaaattgttgcatcccccttagaatgtttctatttccataaggatttaggtatgctattatcccttcttataccctaagatgaagctgtttttgtgctctttgttcatcattggccctcattccaagcactttacgctgtctgtaatgggatctatttttgcactggaatatctgagaattgcaaaactagacaaaagtttcacaacagatttctaagttaaatcattttcattaaaaggaaaaaagaaaaaaaattttgtatgtcaataactttatatgaagtattaaaatgcatatttctatgttgtaatataatgagtcacaa

SEQ ID NO: 694 - DNA, 4046 bp, Homo sapiens
tgaatggtgcatatgagtgaagtctaggatggggccttagcgttaaagccctggggtagtgtgactgagattgttggtaaagaatgtgcagtggttggcatgacctcagaaattctgaaatgggactgcacctgcagactgaagtgttcagagagccagggaggtgcaaggactggggagggtagaggcaggaaccctgcctgccaggaagagctagcatcctgggggcagaaaggctgtgctttcaagtagcagcagatgtattggtatctttgtaatggagaagcatactttacaggaacattaggccagattgtctaaccagagtatctctacctgcttaaaatctaagtagttttcttgtcctttgcagtatcttatcaaacatccatgaagtacatcagaacatgggctactgccctcagtttgatgccatcacagagctgttgactgggagagaacacgtggagttctttgcccttttgagaggagtcccagagaaagaagttggcaaggtactgtgggcacctgaaagccagcctgtctcctttggcatcctgacaatatataccttatggcttttccacacgcattgacttcaggctgtttttcctcatgaatgcagcagcacaaaatgctggttctttgtatctgctttcagggtggaaacctgtaacggtggtggggcagggctgggtgggcagagagggagtgctgctcccaccacacgagtcccttctccctgctttggctcctcaccagttgtcaggttatgattatagaatctagtcctactcagtgaaagaactttcatacatgtatgtgtaggacagcatgataaaattcccaagccagaccaaagtcaaggtgctttttatcactgtaggttggtgagtgggcgattcggaaactgggcctcgtgaagtatggagaaaaatatgctggtaactatagtggaggcaacaaacgcaagctctctacagccatggctttgatcggcgggcctcctgtggtgtttctggtgagtataactgtggatggaaaactgttgttctggcctgagtggaaaacatgactgttcaaaagtcctatatgtccagggctgttgtatgattggcttgtcttcccccagggacagcagagcaaccttggaaaagcagagggaagcttctcccttggcacacactggggtggctgtaccatgcctgcagatgctcccaaatagaggcactccaagcactttgtttcttagcgtgattgaggctggatatgtgatttgatctttctctggaacattctttctaatcatctttgtgttcattccctgaaaatgaagagtgtggacacagctttaaaatccccaaggtagcaactaggtcatagttccttacacacggatagatgaaaaacagatcagactgggaagtggcccttgaccttttttcttctgtagataagagcattgatgttattacgggaagaagcctttgaggcttttatgtattccacctcggtctggaatttgtttctgtaaggctaacagttgcaatatactagggtaatctgagtgagctggaattaaaaaaaaaaaggaatttcaccccaatcttatactgacttcaatagaggtttcagacaaaaagttgttttgtatatacttatcagtcatgaaaagataattacaactaaatggcctttttccttccctatttatttggagaaatttaattacataaaaaagtactcagaatatttgagtttcctgcatcaataagacatttataataatgaccttgtttacaaatgaatttgaaagttactctaattctttgattcatcaagaaataactagaatggcaagttaaaatttaagctgtttcaaagatgcttctgcatttaaaaacaaatttatctttgattttttttccccccagcaaataagacttattttattctaattacaggatgaacccaccacaggcatggatcccaaagcccggcggttcttgtggaattgtgccctaagtgttgtcaaggaggggagatcagtagtgcttacatctcataggtccgtagtaaagtcttgggttcctcactgtgggatgttttaactttccaagtagaatatgcgatcattttgtaaaaattagaaaatacagaaaagcaaagagtaaaacaattattacctgaaattatatatgcatattcttacaaaaatgcaagcccagtataaatactgctctttttcacttaatatattgtaaacattattccaagtcagtgcatttaggtgtcatttcttatagctggatagtattccattaggatatactcttatttaactattcccccttttgtagacatttggattatttccaacttgttcacaattgtaaacaccactacactgaacagcatcatccctatatccacatgtacttgtaacagaatacaattccctaggaagctggaatgctggaagtcatggtgatgttctcatggttacagagaatctctctaaaactaaaacctctttctgttttaccgcagtatggaagaatgtgaagctctttgcactaggatggcaatcatggtcaatggaaggttcaggtgccttggcagtgtccagcatctaaaaaataggtaataaagataatttctttgggatagtgcctagtgagaaggcttgatatttattcttttgtgagtatataaatggtgcctctaacataaagggaaataaaactgagcaaaacagtatagtggaaagaatgagggctttgaagtccgaactgcattcaaattctgtctttaccatttactggttctgtgactcttgggcaagtgacttaactactgtaagagttagtttccctggaagatctacctcctagctttgtgctatagatgaaatgaaaaaaatttacatgtgccagtactggtgagagcgcaagctttggagtcaaacacaaatgggtttgcatcctggccctaccaattatgagctctgagccatgggcaagtgactaactccctgggcctcagtttctctgtaacatctgtcagacttcatgggtccaggtgaggattaaaggagatcatgtatttacagcacatggcatggtgcttcacataaaataagtatttagtaaatgataactggttccttctctcagaaacttatttctgggcctgccaggggccgccctttttcatggcacaagttgggttcccagggttcagtattcttttaaatagttttctggagatcctccatttgggtattttttcctgctttcaggtttggagatggttatacaatagttgtacgaatagcagggtccaacccggacctgaagcctgtccaggatttctttggacttgcatttcctggaagtgttctaaaagagaaacaccggaacatgctacaataccagcttccatcttcattatcttctctggccaggatattcagcatcctctcccagagcaaaaagcgactccacatagaagactactctgtttctcagacaacacttgaccaagtaagctttgagtgtcaaaacagatttacttctcagggtgtggattcctgccccgacactcccgcccataggtccaagagcagtttgtatcttgaattggtgcttgaattcctgatctactattcctagctatgctttttactaaacctctctgaacctgaaaagggagatgatgcctatgtactctataggattattgtgagaatttactgtaataataaccataaaaactaccatttagtgagcacctaccatgggccaggcattttacttggtgcctaatcctatttaaattagataaaaaagtaccaaataggtcctgacacttaagaagtactcagtaaatattttcttccctcttccctttaatcaagaccgtatgtgccaaagtaaatggatgactgagcagttggtgatgtaggggtggggggcgatatagaaagtcagtttttggccgggcgtggtggctcatgcctgtaatcccagcactttgggaggctg

SEQ ID NO: 695 - DNA, 4046 bp, Homo sapiens
actgcaacctccgcctcccaggttcaagcgattctcctgcctcagcctcctgagtagctgagattacaggtgcccgccacaatgcctgcctaatttttttgtattttcagtagagatggggtttcaccatgttggccagactggtctcgagctcctgacctcaggtgatccacctgcctcagcctcccaaagttctgggattacaggcatgagccactgcgcccggcttctctggacttattatgtggagagatagtacaaggcagtggctttcagagttttttgaccatgaccgttgtgggaaatacattttatatctcaacctagtatgtacacacagacatgtagacacatgtataacctaaagtttcataaagcagtacctactgttactaattgtagtgcactctgctatttcttattctaccttatactgcgtcattaaaaaagtgctggtcatgacccactaaatttatttcccaaaccactaatgaacaatgactcacaatttgaacacactggacagggggatagccaataaaattgaaaagagcaaggaaattaatgtattcatgatctcctctcctgtctcttacatttttgcagtagcaatgtaaaggaatcctaagagaacagacattctgggaatagcaggcctagcgctgcacaactgctttcctaggcttgctcctagtaccaagctcctgacgcatatagcagtggcagtaataaccagcccatagtaaggtttgtcacagggactggttgtaagaactgatttggttggtatagctgtgagggcctggcacggtgtccacgtgtgcctcaatcctaattctgaaaaaggctgaccctgggggtgctaattagatacacagagaggaatgaatgctgccagaaggccaagttcatggcaatgccgctgtggctgaggtgcagtcatcagtctggaacgtgaacactgaacttctctcacatgtgattcttcacttgactggcttcatagaaccccaaagccaccccaccaccacataaattgtgtctctaggttctgtgttgctcacactcaaaatttctgggccttctcatttggtgcatgtgaatggtgcatatgagtgaagtctaggatggggccttagcgttaaagccctggggtagtgtgactgagattgttggtaaagaatgtgcagtggttggcatgacctcagaaattctgaaatgggactgcacctgcagactgaagtgttcagagagccagggaggtgcaaggactggggagggtagaggcaggaaccctgcctgccaggaagagctagcatcctgggggcagaaaggctgtgctttcaagtagcagcagatgtattggtatctttgtaatggagaagcatactttacaggaacattaggccagattgtctaaccagagtatctctacctgcttaaaatctaagtagttttcttgtcctttgcagtatcttatcaaacatccatgaagtacatcagaacatgggctactgccctcagtttgatgccatcacagagctgttgactgggagagaacacgtggagttctttgcccttttgagaggagtcccagagaaagaagttggcaaggtactgtgggcacctgaaagccagcctgtctcctttggcatcctgacaatatataccttatggcttttccacacgcattgacttcaggctgtttttcctcatgaatgcagcagcacaaaatgctggttctttgtatctgctttcagggtggaaacctgtaacggtggtggggcagggctgggtgggcagagagggagtgctgctcccaccacacgagtcccttctccctgctttggctcctcaccagttgtcaggttatgattatagaatctagtcctactcagtgaaagaactttcatacatgtatgtgtaggacagcatgataaaattcccaagccagaccaaagtcaaggtgctttttatcactgtaggttggtgagtgggcgattcggaaactgggcctcgtgaagtatggagaaaaatatgctggtaactatagtggaggcaacaaacgcaagctctctacagccatggctttgatcggcgggcctcctgtggtgtttctggtgagtataactgtggatggaaaactgttgttctggcctgagtggaaaacatgactgttcaaaagtcctatatgtccagggctgttgtatgattggcttgtcttcccccagggacagcagagcaaccttggaaaagcagagggaagcttctcccttggcacacactggggtggctgtaccatgcctgcagatgctcccaaatagaggcactccaagcactttgtttcttagcgtgattgaggctggatatgtgatttgatctttctctggaacattctttctaatcatctttgtgttcattccctgaaaatgaagagtgtggacacagctttaaaatccccaaggtagcaactaggtcatagttccttacacacggatagatgaaaaacagatcagactgggaagtggcccttgaccttttttcttctgtagataagagcattgatgttattacgggaagaagcctttgaggcttttatgtattccacctcggtctggaatttgtttctgtaaggctaacagttgcaatatactagggtaatctgagtgagctggaattaaaaaaaaaaaggaatttcaccccaatcttatactgacttcaatagaggtttcagacaaaaagttgttttgtatatacttatcagtcatgaaaagataattacaactaaatggcctttttccttccctatttatttggagaaatttaattacataaaaaagtactcagaatatttgagtttcctgcatcaataagacatttataataatgaccttgtttacaaatgaatttgaaagttactctaattctttgattcatcaagaaataactagaatggcaagttaaaatttaagctgtttcaaagatgcttctgcatttaaaaacaaatttatctttgattttttttccccccagcaaataagacttattttattctaattacaggatgaacccaccacaggcatggatcccaaagcccggcggttcttgtggaattgtgccctaagtgttgtcaaggaggggagatcagtagtgcttacatctcataggtccgtagtaaagtcttgggttcctcactgtgggatgttttaactttccaagtagaatatgcgatcattttgtaaaaattagaaaatacagaaaagcaaagagtaaaacaattattacctgaaattatatatgcatattcttacaaaaatgcaagcccagtataaatactgctctttttcacttaatatattgtaaacattattccaagtcagtgcatttaggtgtcatttcttatagctggatagtattccattaggatatactcttatttaactattcccccttttgtagacatttggattatttccaacttgttcacaattgtaaacaccactacactgaacagcatcatccctatatccacatgtacttgtaacagaatacaattccctaggaagctggaatgctggaagtcatggtgatgttctcatggttacagagaatctctctaaaactaaaacctctttctgttttaccgcagtatggaagaatgtgaagctctttgcactaggatggcaatcatggtcaatggaaggttcaggtgccttggcagtgtccagcatctaaaaaataggtaataaagataatttctttgggatagtgcctagtgagaaggcttgatatttattcttttgtgagtatataaatggtgcctctaacataaagggaaataaaactgagcaaaacagtatagtggaaagaatgagggctttgaagtccgaactgcattcaaattctgtctttaccatttactggttctgtgactcttgggcaagtgacttaactactgtaagagttagtttccctggaagatctacctcctagctttgtgctatagatgaaatgaaaaaaatttacatgtgccagtactggtgaga

SEQ ID NO: 696 - DNA, 4042 bp, Homo sapiens
ccagtgggttacatttcctaagatgtggaattttacattgctacataaaatccccctatgtacatgtacctataatttatttaataaattccttataaatgttggacacattagtttccatttttcactatgtaaatatgtccctgtatacatcttttattatttcctcaggaacaattcctacaaagtaaattgccctctctaaagagcatacaaattgactgagccaccgttaggccattttctgagactgcacaggtcacaaagcaatctgatctttgggaatacagctacattttataggcttcttagataatgttactctaagtactttaaatatgtggggcttctctgggcttttttttttttgagacggagtttcactcttactgcccaggctggagagcaatggcgcgaccttggctcactgcaacctccgcctcccaggttcaagcgattctcctgcctcagcctcctgagtagctgagattacaggtgcccgccacaatgcctgcctaatttttttgtattttcagtagagatggggtttcaccatgttggccagactggtctcgagctcctgacctcaggtgatccacctgcctcagcctcccaaagttctgggattacaggcatgagccactgcgcccggcttctctggacttattatgtggagagatagtacaaggcagtggctttcagagttttttgaccatgaccgttgtgggaaatacattttatatctcaacctagtatgtacacacagacatgtagacacatgtataacctaaagtttcataaagcagtacctactgttactaattgtagtgcactctgctatttcttattctaccttatactgcgtcattaaaaaagtgctggtcatgacccactaaatttatttcccaaaccactaatgaacaatgactcacaatttgaacacactggacagggggatagccaataaaattgaaaagagcaaggaaattaatgtattcatgatctcctctcctgtctcttacatttttgcagtagcaatgtaaaggaatcctaagagaacagacattctgggaatagcaggcctagcgctgcacaactgctttcctaggcttgctcctagtaccaagctcctgacgcatatagcagtggcagtaataaccagcccatagtaaggtttgtcacagggactggttgtaagaactgatttggttggtatagctgtgagggcctggcacggtgtccacgtgtgcctcaatcctaattctgaaaaaggctgaccctgggggtgctaattagatacacagagaggaatgaatgctgccagaaggccaagttcatggcaatgccgctgtggctgaggtgcagtcatcagtctggaacgtgaacactgaacttctctcacatgtgattcttcacttgactggcttcatagaaccccaaagccaccccaccaccacataaattgtgtctctaggttctgtgttgctcacactcaaaatttctgggccttctcatttggtgcatgtgaatggtgcatatgagtgaagtctaggatggggccttagcgttaaagccctggggtagtgtgactgagattgttggtaaagaatgtgcagtggttggcatgacctcagaaattctgaaatgggactgcacctgcagactgaagtgttcagagagccagggaggtgcaaggactggggagggtagaggcaggaaccctgcctgccaggaagagctagcatcctgggggcagaaaggctgtgctttcaagtagcagcagatgtattggtatctttgtaatggagaagcatactttacaggaacattaggccagattgtctaaccagagtatctctacctgcttaaaatctaagtagttttcttgtcctttgcagtatcttatcaaacatccatgaagtacatcagaacatgggctactgccctcagtttgatgccatcacagagctgttgactgggagagaacacgtggagttctttgcccttttgagaggagtcccagagaaagaagttggcaaggtactgtgggcacctgaaagccagcctgtctcctttggcatcctgacaatatataccttatggcttttccacacgcattgacttcaggctgtttttcctcatgaatgcagcagcacaaaatgctggttctttgtatctgctttcagggtggaaacctgtaacggtggtggggcagggctgggtgggcagagagggagtgctgctcccaccacacgagtcccttctccctgctttggctcctcaccagttgtcaggttatgattatagaatctagtcctactcagtgaaagaactttcatacatgtatgtgtaggacagcatgataaaattcccaagccagaccaaagtcaaggtgctttttatcactgtaggttggtgagtgggcgattcggaaactgggcctcgtgaagtatggagaaaaatatgctggtaactatagtggaggcaacaaacgcaagctctctacagccatggctttgatcggcgggcctcctgtggtgtttctggtgagtataactgtggatggaaaactgttgttctggcctgagtggaaaacatgactgttcaaaagtcctatatgtccagggctgttgtatgattggcttgtcttcccccagggacagcagagcaaccttggaaaagcagagggaagcttctcccttggcacacactggggtggctgtaccatgcctgcagatgctcccaaatagaggcactccaagcactttgtttcttagcgtgattgaggctggatatgtgatttgatctttctctggaacattctttctaatcatctttgtgttcattccctgaaaatgaagagtgtggacacagctttaaaatccccaaggtagcaactaggtcatagttccttacacacggatagatgaaaaacagatcagactgggaagtggcccttgaccttttttcttctgtagataagagcattgatgttattacgggaagaagcctttgaggcttttatgtattccacctcggtctggaatttgtttctgtaaggctaacagttgcaatatactagggtaatctgagtgagctggaattaaaaaaaaaaaggaatttcaccccaatcttatactgacttcaatagaggtttcagacaaaaagttgttttgtatatacttatcagtcatgaaaagataattacaactaaatggcctttttccttccctatttatttggagaaatttaattacataaaaaagtactcagaatatttgagtttcctgcatcaataagacatttataataatgaccttgtttacaaatgaatttgaaagttactctaattctttgattcatcaagaaataactagaatggcaagttaaaatttaagctgtttcaaagatgcttctgcatttaaaaacaaatttatctttgattttttttccccccagcaaataagacttattttattctaattacaggatgaacccaccacaggcatggatcccaaagcccggcggttcttgtggaattgtgccctaagtgttgtcaaggaggggagatcagtagtgcttacatctcataggtccgtagtaaagtcttgggttcctcactgtgggatgttttaactttccaagtagaatatgcgatcattttgtaaaaattagaaaatacagaaaagcaaagagtaaaacaattattacctgaaattatatatgcatattcttacaaaaatgcaagcccagtataaatactgctctttttcacttaatatattgtaaacattattccaagtcagtgcatttaggtgtcatttcttatagctggatagtattccattaggatatactcttatttaactattcccccttttgtagacatttggattatttccaacttgttcacaattgtaaacaccactacactgaacagcatcatccctatatccacatgtacttgtaacagaatacaattccctaggaagctggaatgctggaagtcatggtgatgttctcatggttacagagaatctct

SEQ ID NO: 697 - DNA, 4046 bp, Homo sapiens
attgagatcatactgtatgtagaatttaaaattagtttttattgttaatgagtgtattatgaatatttcccagtgggttacatttcctaagatgtggaattttacattgctacataaaatccccctatgtacatgtacctataatttatttaataaattccttataaatgttggacacattagtttccatttttcactatgtaaatatgtccctgtatacatcttttattatttcctcaggaacaattcctacaaagtaaattgccctctctaaagagcatacaaattgactgagccaccgttaggccattttctgagactgcacaggtcacaaagcaatctgatctttgggaatacagctacattttataggcttcttagataatgttactctaagtactttaaatatgtggggcttctctgggcttttttttttttgagacggagtttcactcttactgcccaggctggagagcaatggcgcgaccttggctcactgcaacctccgcctcccaggttcaagcgattctcctgcctcagcctcctgagtagctgagattacaggtgcccgccacaatgcctgcctaatttttttgtattttcagtagagatggggtttcaccatgttggccagactggtctcgagctcctgacctcaggtgatccacctgcctcagcctcccaaagttctgggattacaggcatgagccactgcgcccggcttctctggacttattatgtggagagatagtacaaggcagtggctttcagagttttttgaccatgaccgttgtgggaaatacattttatatctcaacctagtatgtacacacagacatgtagacacatgtataacctaaagtttcataaagcagtacctactgttactaattgtagtgcactctgctatttcttattctaccttatactgcgtcattaaaaaagtgctggtcatgacccactaaatttatttcccaaaccactaatgaacaatgactcacaatttgaacacactggacagggggatagccaataaaattgaaaagagcaaggaaattaatgtattcatgatctcctctcctgtctcttacatttttgcagtagcaatgtaaaggaatcctaagagaacagacattctgggaatagcaggcctagcgctgcacaactgctttcctaggcttgctcctagtaccaagctcctgacgcatatagcagtggcagtaataaccagcccatagtaaggtttgtcacagggactggttgtaagaactgatttggttggtatagctgtgagggcctggcacggtgtccacgtgtgcctcaatcctaattctgaaaaaggctgaccctgggggtgctaattagatacacagagaggaatgaatgctgccagaaggccaagttcatggcaatgccgctgtggctgaggtgcagtcatcagtctggaacgtgaacactgaacttctctcacatgtgattcttcacttgactggcttcatagaaccccaaagccaccccaccaccacataaattgtgtctctaggttctgtgttgctcacactcaaaatttctgggccttctcatttggtgcatgtgaatggtgcatatgagtgaagtctaggatggggccttagcgttaaagccctggggtagtgtgactgagattgttggtaaagaatgtgcagtggttggcatgacctcagaaattctgaaatgggactgcacctgcagactgaagtgttcagagagccagggaggtgcaaggactggggagggtagaggcaggaaccctgcctgccaggaagagctagcatcctgggggcagaaaggctgtgctttcaagtagcagcagatgtattggtatctttgtaatggagaagcatactttacaggaacattaggccagattgtctaaccagagtatctctacctgcttaaaatctaagtagttttcttgtcctttgcagtatcttatcaaacatccatgaagtacatcagaacatgggctactgccctcagtttgatgccatcacagagctgttgactgggagagaacacgtggagttctttgcccttttgagaggagtcccagagaaagaagttggcaaggtactgtgggcacctgaaagccagcctgtctcctttggcatcctgacaatatataccttatggcttttccacacgcattgacttcaggctgtttttcctcatgaatgcagcagcacaaaatgctggttctttgtatctgctttcagggtggaaacctgtaacggtggtggggcagggctgggtgggcagagagggagtgctgctcccaccacacgagtcccttctccctgctttggctcctcaccagttgtcaggttatgattatagaatctagtcctactcagtgaaagaactttcatacatgtatgtgtaggacagcatgataaaattcccaagccagaccaaagtcaaggtgctttttatcactgtaggttggtgagtgggcgattcggaaactgggcctcgtgaagtatggagaaaaatatgctggtaactatagtggaggcaacaaacgcaagctctctacagccatggctttgatcggcgggcctcctgtggtgtttctggtgagtataactgtggatggaaaactgttgttctggcctgagtggaaaacatgactgttcaaaagtcctatatgtccagggctgttgtatgattggcttgtcttcccccagggacagcagagcaaccttggaaaagcagagggaagcttctcccttggcacacactggggtggctgtaccatgcctgcagatgctcccaaatagaggcactccaagcactttgtttcttagcgtgattgaggctggatatgtgatttgatctttctctggaacattctttctaatcatctttgtgttcattccctgaaaatgaagagtgtggacacagctttaaaatccccaaggtagcaactaggtcatagttccttacacacggatagatgaaaaacagatcagactgggaagtggcccttgaccttttttcttctgtagataagagcattgatgttattacgggaagaagcctttgaggcttttatgtattccacctcggtctggaatttgtttctgtaaggctaacagttgcaatatactagggtaatctgagtgagctggaattaaaaaaaaaaaggaatttcaccccaatcttatactgacttcaatagaggtttcagacaaaaagttgttttgtatatacttatcagtcatgaaaagataattacaactaaatggcctttttccttccctatttatttggagaaatttaattacataaaaaagtactcagaatatttgagtttcctgcatcaataagacatttataataatgaccttgtttacaaatgaatttgaaagttactctaattctttgattcatcaagaaataactagaatggcaagttaaaatttaagctgtttcaaagatgcttctgcatttaaaaacaaatttatctttgattttttttccccccagcaaataagacttattttattctaattacaggatgaacccaccacaggcatggatcccaaagcccggcggttcttgtggaattgtgccctaagtgttgtcaaggaggggagatcagtagtgcttacatctcataggtccgtagtaaagtcttgggttcctcactgtgggatgttttaactttccaagtagaatatgcgatcattttgtaaaaattagaaaatacagaaaagcaaagagtaaaacaattattacctgaaattatatatgcatattcttacaaaaatgcaagcccagtataaatactgctctttttcacttaatatattgtaaacattattccaagtcagtgcatttaggtgtcatttcttatagctggatagtattccattaggatatactcttatttaactattcccccttttgtagacatttggattatttccaacttgttcacaattgtaaacaccactacactgaacagcatcatccctatatccacatgtacttgtaacagaata

SEQ ID NO: 698 - DNA, 4025 bp, Homo sapiens
gagctttttcttagaacccgtggagcacctggttgagggtcacagaggaggcgcacagggaaacactcaccaatgggggttgcattgaactgaactcaaaatatgtgataaaactgattttcctgatgtgggcatcccgcagccccctccctgcccatcctggagactgtggcaagtaggttttataatactacgttagagactgaatctttgtcctgaaaaatagtttgaaaggttcatttttcttgttttttcccccaagacctgtaaatgcaaagctatctcctctgaatgatgaagatgaagatgtgaggcgggaaagacagagaattcttgatggtggaggccagaatgacatcttagaaatcaaggagttgacgaaggtgagagagtacaggttacaatagctcatcttcagtttttttcagctttatgtgctgtaacccagcagtttgctgacttgcttaataaaagggcatgtgttcccaaaatgtacatctataccaaggttctgtcaattttattttaaaaacaccatggagacttcttaaagaattcttactgagaattcttttgtgatatgaattcccattctcgaatacattggttttatatgcttacatttatgtgttagttattaaaacatactaatattgtatatctagtcaaaactgaggtagagagaataaatggttgattttgagtttgagtttcatagtccaaaaagctgatatattgcctgtgttcaagagggtctatatcagccctctagatgccagcatctccaaattttacttttttggaatctgtacagtatttgcaatatttttattacaaatttctactctgtggaatttaatttttaaaatacctgcaatacatatatatgttgaatagatgaaaaattatgtagataataatgaatgatacggttctaaaaagacaggttaaaaagtaagttcacttttattttgagcttcagaatcattcagaagccagtcgccacaaacgcagaccaaggctcttggcacatcaaatatgcctatggcttagggttattgacaagtcttatgttgcagtgtatgtggtttatagtcctgccttccacagttgcttgggagagctgtgagtcactgaggcttatgaatgtttacattttgtttgttgcagatatatagaaggaagcggaagcctgctgttgacaggatttgcgtgggcattcctcctggtgaggtaaagacactttgtctatattgcgtttgtccctattagttcagactatctctacccaatcaagcaacgatgctcgttaagaggtaaaagtggattttaaaggcttctgtatttatgccaggatggagcaattagtcatcgagaagagagggaccctgtatgtcaagagaatgatttcagagaatccaatacaatttaagaaaaagcatggggctgggcgcagtgattcactcctgtaatcccagcactttgggaggccgaggtgggcggatcacgaggtcaggagattgagaccatcctggccaacatggtgaaaccccatctctactataaatacaaaaattagctgggcatagtagtgcattcctgtagtcccagctactcgggaggctgaggcaggagaattgcttgaacctaggagggggaggttgcccagattgcgctgctgcactccagcctggtgacagagtgagactcatgtcaacaacaaaaacagaaaaagcacgcacatctaaaacatgcttttgtgatccatttgggatggtgatgacattcaaatagttttttaaaaatagattttctcctttctggtttccgtttgtgttcttttatgcccttttgccagagtaggtggtgcaatttggctagctggctttcattactgtttttcacacattaactttggcctcaacttgacaactcaaataatatttataaatacagccacacttaaaatggtcccattatgaaatacatatttaaatatctatacgatgtgttaaaaccaagaaaatatttgattcttctctgatatttaagaattgaaggtttgaggtagttacgtgttaggggcatttatattcatgtttttagagtttgcttatacaacttaatctttccttttcagtgctttgggctcctgggagttaatggggctggaaaatcatcaactttcaagatgttaacaggagataccactgttaccagaggagatgctttccttaacaaaaataggtgagaaaagaagtggcttgtattttgctgcaaagactttgtttttaatttatttaaagaaataggttgttatttttgattacagtggtatttttagagttcataaaaatgttgaaatatagtaaagggtaaagaagcacataaaatcatccatgatttcaatatctagagataatcacaatttacatttcctttcagtctcattctcttcttttaacagctttattcaggtataatttacatacaatataatttgcttgttttttaagagtataatttagtgatttttggtaaattgagagttttgcaaccatcaccacaatccagttttagaacttttccatcaccccacatctgtcttatatacacatataaatgtgccatacaattgagatcatactgtatgtagaatttaaaattagtttttattgttaatgagtgtattatgaatatttcccagtgggttacatttcctaagatgtggaattttacattgctacataaaatccccctatgtacatgtacctataatttatttaataaattccttataaatgttggacacattagtttccatttttcactatgtaaatatgtccctgtatacatcttttattatttcctcaggaacaattcctacaaagtaaattgccctctctaaagagcatacaaattgactgagccaccgttaggccattttctgagactgcacaggtcacaaagcaatctgatctttgggaatacagctacattttataggcttcttagataatgttactctaagtactttaaatatgtggggcttctctgggcttttttttttttgagacggagtttcactcttactgcccaggctggagagcaatggcgcgaccttggctcactgcaacctccgcctcccaggttcaagcgattctcctgcctcagcctcctgagtagctgagattacaggtgcccgccacaatgcctgcctaatttttttgtattttcagtagagatggggtttcaccatgttggccagactggtctcgagctcctgacctcaggtgatccacctgcctcagcctcccaaagttctgggattacaggcatgagccactgcgcccggcttctctggacttattatgtggagagatagtacaaggcagtggctttcagagttttttgaccatgaccgttgtgggaaatacattttatatctcaacctagtatgtacacacagacatgtagacacatgtataacctaaagtttcataaagcagtacctactgttactaattgtagtgcactctgctatttcttattctaccttatactgcgtcattaaaaaagtgctggtcatgacccactaaatttatttcccaaaccactaatgaacaatgactcacaatttgaacacactggacagggggatagccaataaaattgaaaagagcaaggaaattaatgtattcatgatctcctctcctgtctcttacatttttgcagtagcaatgtaaaggaatcctaagagaacagacattctgggaatagcaggcctagcgctgcacaactgctttcctaggcttgctcctagtaccaagctcctgacgcatatagcagtggcagtaataaccagcccatagtaaggtttgtcacagggactggttgtaagaactgatttggttggtatagctgtgagggcctggcacggtgtccacgtgtgcctcaatcctaattctgaaaaaggctgaccctgggggtgctaattagatacacagagaggaatgaatgctgcc

SEQ ID NO: 699 - DNA, 4045 bp, Homo sapiens
agaagaatttctaaaattctgacaaaatcctgaaactcaaatattgacccagacatgagcaatttgcttttcaaatgctaagggatttttaatggatttgctttaattaaatctagcctgtttctaagctttattcattatttctccatactcagagcatttctccagattttctaaagaatagaattttattgctacatatcatcagctatgcctgctgctatttaattggtatctgaattaaaaggtctggtttgtccctagagaatcaaattttttcttcactcccatatttcagaacttgatacatttttaggataaaccatgaatgacacccgtttcttctccctcaccctcccttccctcccattttttttttttttttttagaagctgaataatatcaatgatatcctgaagtccgtgttcttgatcttcccacatttttgcctgggacgagggctcatcgacatggtgaaaaaccaggcaatggctgatgccctggaaaggtttggtgagtgaagcagtggctgtaggatgctttaatggagatggcactctgcataggccttggtaccctgaactttgttttggaaagaagcaggtgactaagcacaggatgttcccccacccccatgcccagtgacagggctcatgccaacacagctggttgtggcatgggttttgtgacacaaccatttgtctgtgtctctgatagcattgagaaaagtgaaagggcagttttgaaggtaaggaaaatagtggcatttgcttggatccactggctcatgccactgtctgggttggttagaagcactggaaaagtcaaaccataactttgagaattaggtgatcagggaatcagaaggaaagatgcaaactttggctcttttaggcgaatcatgtgcctgcagatgaggtcatttattatcttttacacagtctataaaattataatgtattacatctttttctacctttagaatggttaaaaatatttctccggtagccatatgattattattcatccattagataatatagtcaaatgggccatgttatttactgttcatagaagaggggctttttgcaacttgggctacaaaggagatatgtaaggaatttaaggaatggttacatggaactagatttaattgaatctagtggtttaattgattcactaggatatatgctactgaaaggggaatctgcttaaagtgctttctgatatttattattactaaaacttagaatttattaaaaatactgactgtgaaaattacttgggtcgtttgcctttttaaaaggatttttggcatgtctcattaaaaaaagaaatactagatatcttcagtgaagttacaaatcgaatacacattggctctgaaattctgattgatactgggtcataaaaagttttcccaaatcagacttggaaagtgatcactctcttgttactcttttttccttgtcatgggtgatagccatttgtgtttattggaagatcggtgaattttaaggaacataggcccaaatttgaggaagggccatggtttttgatccctccattctgaccggatctctgcattgtgtctactaggggagaatcgctttgtgtcaccattatcttgggacttggtgggacgaaacctcttcgccatggccgtggaaggggtggtgttcttcctcattactgttctgatccagtacagattcttcatcaggcccaggtgagctttttcttagaacccgtggagcacctggttgagggtcacagaggaggcgcacagggaaacactcaccaatgggggttgcattgaactgaactcaaaatatgtgataaaactgattttcctgatgtgggcatcccgcagccccctccctgcccatcctggagactgtggcaagtaggttttataatactacgttagagactgaatctttgtcctgaaaaatagtttgaaaggttcatttttcttgttttttcccccaagacctgtaaatgcaaagctatctcctctgaatgatgaagatgaagatgtgaggcgggaaagacagagaattcttgatggtggaggccagaatgacatcttagaaatcaaggagttgacgaaggtgagagagtacaggttacaatagctcatcttcagtttttttcagctttatgtgctgtaacccagcagtttgctgacttgcttaataaaagggcatgtgttcccaaaatgtacatctataccaaggttctgtcaattttattttaaaaacaccatggagacttcttaaagaattcttactgagaattcttttgtgatatgaattcccattctcgaatacattggttttatatgcttacatttatgtgttagttattaaaacatactaatattgtatatctagtcaaaactgaggtagagagaataaatggttgattttgagtttgagtttcatagtccaaaaagctgatatattgcctgtgttcaagagggtctatatcagccctctagatgccagcatctccaaattttacttttttggaatctgtacagtatttgcaatatttttattacaaatttctactctgtggaatttaatttttaaaatacctgcaatacatatatatgttgaatagatgaaaaattatgtagataataatgaatgatacggttctaaaaagacaggttaaaaagtaagttcacttttattttgagcttcagaatcattcagaagccagtcgccacaaacgcagaccaaggctcttggcacatcaaatatgcctatggcttagggttattgacaagtcttatgttgcagtgtatgtggtttatagtcctgccttccacagttgcttgggagagctgtgagtcactgaggcttatgaatgtttacattttgtttgttgcagatatatagaaggaagcggaagcctgctgttgacaggatttgcgtgggcattcctcctggtgaggtaaagacactttgtctatattgcgtttgtccctattagttcagactatctctacccaatcaagcaacgatgctcgttaagaggtaaaagtggattttaaaggcttctgtatttatgccaggatggagcaattagtcatcgagaagagagggaccctgtatgtcaagagaatgatttcagagaatccaatacaatttaagaaaaagcatggggctgggcgcagtgattcactcctgtaatcccagcactttgggaggccgaggtgggcggatcacgaggtcaggagattgagaccatcctggccaacatggtgaaaccccatctctactataaatacaaaaattagctgggcatagtagtgcattcctgtagtcccagctactcgggaggctgaggcaggagaattgcttgaacctaggagggggaggttgcccagattgcgctgctgcactccagcctggtgacagagtgagactcatgtcaacaacaaaaacagaaaaagcacgcacatctaaaacatgcttttgtgatccatttgggatggtgatgacattcaaatagttttttaaaaatagattttctcctttctggtttccgtttgtgttcttttatgcccttttgccagagtaggtggtgcaatttggctagctggctttcattactgtttttcacacattaactttggcctcaacttgacaactcaaataatatttataaatacagccacacttaaaatggtcccattatgaaatacatatttaaatatctatacgatgtgttaaaaccaagaaaatatttgattcttctctgatatttaagaattgaaggtttgaggtagttacgtgttaggggcatttatattcatgtttttagagtttgcttatacaacttaatctttccttttcagtgctttgggctcctgggagttaatggggctggaaaatcatcaactttcaagatgttaacaggagataccactgttaccagaggagatgctttccttaacaaaaataggtgagaaaagaagtggcttgtattttgctgcaaagactttgtttttaatttatttaaagaaataggt

SEQ ID NO: 700 - DNA, 4036 bp, Homo sapiens
acacattagatacctttcctgtatgtggagcatggcagttcctgtttctgctttactcctacaggatactaatataggacactaggatctttataccaagaccccatgtaatgggcttatgagaccattcttcttataaaaatctgacagaatttttgtatgtgttagatcaataggctgcatactgttattttcaagttgatttacagccagaaatattaatttatttgagtagttacagagtaatatttctgctctcatttagttttcaagccccactagtcctttgtgtgtgaaaatttacaacttactgctcttacaaggtcatgaacagtggaccaaagtgaatgccattaaccactctgacttccttcattagttttattgtgacagtggactcttttgacctcagtaataccagtttggcatttacattgtcatatttttagacttaaaaatgatcatcttaaccctgaataaaatgtgtctggtgaacagatgtttttccttgggctgtgcctcagatatctctgtgtgtgtgtacgtgtgtgtttgtctgtgtgtccatgtcctcactgattgagccctaactgcatcaaagacccctcagattttcacacgctttttctctccaggatgaccacatcagtggatgtccttgtgtccatctgtgtcatctttgcaatgtccttcgtcccagccagctttgtcgtattcctgatccaggagcgggtcagcaaagcaaaacacctgcagttcatcagtggagtgaagcctgtcatctactggctctctaattttgtctgggatatggtaaggacacaggcctgctgtatctttctgatgtctgtcagggccatggattgatatggataagaaagaaagagctctggctatcatcaggaaatgttccagctactctaaagatgtatgaaaaagaaatagccagaggcaggtgatcactttcatgacaccaaacacagcattgggtaccagagttcatgtcacaccagagggaaaattctgtacacaatgatgaaaattaataccactaccacttaagttcctatgtgacaactttcccaagaatcagagagatacaagtcaaaactccaagtcaatgcctctaacttctctgatgggttttaacctccagagtcagaatgttctttgccttactaggaaagccatctgtcatttgaaaactctgtacattttatcagcagcttatccatccattgcaaatatgtttttgtgccagccacaatatattgcttctatttggaccaatatgggggatttgaaggaattctgaagttctaattatatttcaactctactttacaatatctccctgaaatatatctccctgtaacttctattaattataagctacacagagcaaatctaattcttctcccaccgaacaagtccctggatatttaaaaataactctcatactctcatttaacctgagtattacccagataagatgatatatgagaatacaccttgtaacctccgaagcactgtacaaatgtgagcaatgatggtggagatgatgatgagatctttgctgtttataccaagccccttagactgtgtcactcttctgatccggttgtccttgtatggccatgctgtatattgtgaatgtccgttttcaaaagcaaagccaagaattaaccttgtgttcaggctgtggtctgaatggttatgggtccagagggagttgatctttagctcacacttctattactgcagcacaaagattttgcattttggaaggagcaccgtcttactggcaacttagtggtaaaccaaaacctccatttcacacaaatgattgtgaaattcgggtctccttcattctatacaaattcatttgatttttttgaaactaaactttatatttatccatattaaattacatgggttttatttttgttttatcttgattcagtaattactcctttcagtaaacacagactgagtgctgtgtgtctgacttatgccaggcataggtgattcagagatgaaaggtcaagtccctgaacccatctcttgtcttcctgggtattatctgtccctccctgctttagagctcctgaaatttgctagaagcatgtcttcatctaagttgttgataaacacatcaagtaggattggactgaggcagagccctgtagtctgaagctgcagttcttctagcggctgacaagccccactatcacttccctgctggtgctttgctctgccagctgtgaattctcataattgtcctatcgtcaagtctttatttctgcattttactgcttgatacactgtcaggacagactttaaaattattctcagtgcgatgaaacaattctgacattcatgttatgagcagttacctcataaatagattacatgtgagattgaacttgggcagactataatatagcattaatgacgaaacagacacagtcatcttcgggaagaagaatagaggcttatttgctgcctgtgaaattaaaattactctgactgggaatccatcgttcagtaagtttactgagtgtgacaccttggcttgactgttggaaagacagaaagggcatgtagtttataaaatcagccaaggggaaaatgcttgtcaaaatgtattgtcgggtattttgattaatagtttatgtggcttcattaattcagagttactctccaatatgtttatctgccctttcttgtctgataatggtgaaaacttgtgtgatgcattgtatatttgatttaggggtgaactggatgtctttgttttcacttttagtgcaattacgttgtccctgccacactggtcattatcatcttcatctgcttccagcagaagtcctatgtgtcctccaccaatctgcctgtgctagcccttctacttttgctgtatgggtaagtcacctctgagtgagggagctgcacagtggataaggcatttggtgcccagtgtcagaaggagggcagggactctcagtagacacttatctttttgtgtctcaacaggtggtcaatcacacctctcatgtacccagcctcctttgtgttcaagatccccagcacagcctatgtggtgctcaccagcgtgaacctcttcattggcattaatggcagcgtggccacctttgtgctggagctgttcaccgacaatgtgagtcatgcagagagaacactcctgctgggatgagcatctctgggagccagaggacagtgtttaattgtgatcttattccacttgtcagtggtattgacactgctgactgccttgtcctgtcttcagagtctgtcttccctgagaaggcaaagcacctttctttcttgctgtgccttacattttgctggtcaagcctttcagtttcttttgacagttttttttacttctttcttttttcaatgttgctcttaccaagagtagctcctctgccttccactttacacatgagagctgggcgacgccattcagtcctaaggcttttaccatcacctctcttggtgtttttattgtcatctctaagatcaatgcctttagccttgatcataaccttgaactctaatctcaaattctcacttgcctagtggattgctccatttagatagtatatagataccccaacctggatatgtcctagttttctttccccttggaacttaatgcttttcttgccatccctgtcacactcagtggcactaccatccactcggttgcccaagctggctcttagagttatcctagatgcttgctttgctgttgcagatttcccacattcaactggttatgttgtcagttcttccaggtatggacctctaaaataaggcttcctctccattccggttgtcattgcctttgtccaaacacagcacacaaggccttttacagttgcacaactcttcctgtccatacccaccacaccctttcccagctgtaagcttcagatgagttgcctccaaccaccatgctcctgtaggcctggcttgaaatgcccttcttctgtcacagggtctggta

SEQ ID NO: 701 - DNA, 4045 bp, Homo sapiens
tgagccagacaaaactgaattacttagttgtacgtttaaaagtgtaggtcaaaaacaaatccagaggccaggagctgtggctcatgcctgtaatcctagcactttgggaggccgaagcgggtggatcacttgaggtcaggagttcgagaccagcctggcctacatgacaaaaccccgtatctactaaaaatacaaaaaaattagctgggcttggtggcacacacctgtaatcccagctacttgggaggctgaggcaggagaattgcttgaaccctgtaggaagaggttgtagtgagccaagatcgcaccgttgcactccagcctgggcaacaagagcaaaactccatctcaaaaaacaaattaaatccagagatttaaaagctctcagaggctgggcgcggtggcttacacctgttatcccagcattttgggatgccgaggcgggcaaagcacaaggtcaggagtttgagaccagcctggccaacatagtgaaaccctgtctctgctaaaaacatagaaaaattagccgggcatggtggcgtgcgcctgtaatcccagctactcgggaggctgaggtgagagaattacttgaacccgggaggcggaggttgcagtgagcccagattgcaccactgcactccagcctgggcgacagagcaagactccatctcaaaaaaagctctcagaacaaccaggtttacaaatttggtcagttggtaaataaactgggtttcaaacatactttgctgaaacaatcactgactaaataggaaatgaatcttttttttttttaagctggcaagctggtctgtaggacctgataagtactcacttcatttctctgtgtctcaggtttcccatttttaggtgagaattaaggggctctgataaaacagaccctaggattgtggacagcagtgatagtcctagagtccacaagtctgcttttgagtgatgggcccatgtatctggcacatctgcaggcagagcgtggttctggctcttcagatgatgccggtggagcactttgaggagtcctcaccccaccgtgataaccagacattaaaatcttggggctttgcatcccaggatttctctgtgattccttctagacttgtggcatcatggcagcatcactgctgtagatttctagtcacttggttctcaggagccgtttatttaatggcttcacatttaatttcagtgaacaaggtagtggcattgctcttcacagggccgtcctgttgtccacaggttccagattgactgttgccccttatctatgtgaacagtcacaactgaggcaggtttctgttgtttacaggacagttctgcagatcgatttctcaacagcttgggaagatttatgacaggactggacaccaaaaataatgtcaaggtaaaccgctgtctttgttctagtagctttttgatgaacaataatccttatgtttcctggagtactttcaactcatggtaaagttggcaggggcattcacaacagaaaagagcaaactattaactttaccagtgaggcagtacggtgtagtgtagtgattcagagaatttgctttgccaccagacataccaggtaaccttgactaagttacttaacctatctaaacctcagttccctcatctgtgaaatggagacagtaatcatagctatttccaaactgttgtgagaattcaatgagttaaaggtataaggtcctcaccacagcgcctgcccacatagtcagtgatcactatgtcctgaacactgtaattacttcgccatattctctgatcatagtgttttgccttggtatgtgactagaatttctttctgaggtttatgggcatggttggtgggtatgcacctgcctgcaggagcccggtttgggggcattaccttgtacctggtatgttttctttcaggtgtggttcaataacaagggctggcatgcaatcagctctttcctgaatgtcatcaacaatgccattctccgggccaacctgcaaaagggagagaaccctagccattatggaattactgctttcaatcatcccctgaatctcaccaagcagcagctctcagaggtggctctgtaagtgtggctgtgtctgtatagatggagtggggcaagggagagggttatggagaaggggagaaaaatgtgaatctcattgtaggggaacagctgcagagaccgttatattatgataaatctggattgatccaggctctgggcagaagtgataagtttacgaattggctggttgggcttcttgaactgcagaagagaaaatgacactgatatgtaaaaatcgtaacatttagtgaattcatataaagtgagttcaaaaattgttaattaaattataatttaattataagtgtttaatcagtttgatttgtttaaaaaccactgttttaaatttggtggaatatgtttttattagcttgtatctttaattcctaaattaagctgtgtgtgtgtgtgtgtgtgtgtgtgtgtgtgtgtgtgtgtgaagtttaaagccaggatgagctagtttaaagtatgcagcctttggagtcatacagatctgggtttgaatctggtctctaaactttatagatgtatgatattaaatgaggcagttcatgtaaattgccaagcccagcactcagcacagagttgatatttcacacacattagatacctttcctgtatgtggagcatggcagttcctgtttctgctttactcctacaggatactaatataggacactaggatctttataccaagaccccatgtaatgggcttatgagaccattcttcttataaaaatctgacagaatttttgtatgtgttagatcaataggctgcatactgttattttcaagttgatttacagccagaaatattaatttatttgagtagttacagagtaatatttctgctctcatttagttttcaagccccactagtcctttgtgtgtgaaaatttacaacttactgctcttacaaggtcatgaacagtggaccaaagtgaatgccattaaccactctgacttccttcattagttttattgtgacagtggactcttttgacctcagtaataccagtttggcatttacattgtcatatttttagacttaaaaatgatcatcttaaccctgaataaaatgtgtctggtgaacagatgtttttccttgggctgtgcctcagatatctctgtgtgtgtgtacgtgtgtgtttgtctgtgtgtccatgtcctcactgattgagccctaactgcatcaaagacccctcagattttcacacgctttttctctccaggatgaccacatcagtggatgtccttgtgtccatctgtgtcatctttgcaatgtccttcgtcccagccagctttgtcgtattcctgatccaggagcgggtcagcaaagcaaaacacctgcagttcatcagtggagtgaagcctgtcatctactggctctctaattttgtctgggatatggtaaggacacaggcctgctgtatctttctgatgtctgtcagggccatggattgatatggataagaaagaaagagctctggctatcatcaggaaatgttccagctactctaaagatgtatgaaaaagaaatagccagaggcaggtgatcactttcatgacaccaaacacagcattgggtaccagagttcatgtcacaccagagggaaaattctgtacacaatgatgaaaattaataccactaccacttaagttcctatgtgacaactttcccaagaatcagagagatacaagtcaaaactccaagtcaatgcctctaacttctctgatgggttttaacctccagagtcagaatgttctttgccttactaggaaagccatctgtcatttgaaaactctgtacattttatcagcagcttatccatccattgcaaatatgtttttgtgccagccacaatatattgcttctatttggaccaatatgggggatttgaaggaattctgaagttctaattatatttcaactctactttacaatatctccctgaaatatatctccc

SEQ ID NO: 702 - DNA, 4045 bp, Homo sapiens
catgctagaaaggagccggagcctgtgtataaggccagcgcagcctactctggacagtgcagggttcccactctcccaactccccatctgcttgcctccagacccacattcacacacgagccactgggttggaggagcatctgtgagatgaaacaccattctttcctcaatgtctcagctatctaactgtgtgtgtaatcaggccaggtcctccctgctgggcagaaaccatgggagttaagagattgccaacatttattagaggaagctgacgtgtaacttctctgaggcaaaatttagccctcctttgaacaggaatttgactcagtgaaccttgtacacactcgcactgagtctgctgctgatgatactgtgcaccccactgtctgggttttaatgtcaggctgttcttttaggtatggcggcttttccctgggtgtcagtaatactcaagcacttcctccgagtcaagaagttaatgatgccatcaaacaaatgaagaaacacctaaagctggccaaggtaaaatatctatcgtaagatgtatcagaaaaatgggcatgtagctgctgggatataggagtagttggcaggttaaacggatcacctggcagctcattgttctgaatatgttggcatacagagccgtctttggcatttagcgatttgagccagacaaaactgaattacttagttgtacgtttaaaagtgtaggtcaaaaacaaatccagaggccaggagctgtggctcatgcctgtaatcctagcactttgggaggccgaagcgggtggatcacttgaggtcaggagttcgagaccagcctggcctacatgacaaaaccccgtatctactaaaaatacaaaaaaattagctgggcttggtggcacacacctgtaatcccagctacttgggaggctgaggcaggagaattgcttgaaccctgtaggaagaggttgtagtgagccaagatcgcaccgttgcactccagcctgggcaacaagagcaaaactccatctcaaaaaacaaattaaatccagagatttaaaagctctcagaggctgggcgcggtggcttacacctgttatcccagcattttgggatgccgaggcgggcaaagcacaaggtcaggagtttgagaccagcctggccaacatagtgaaaccctgtctctgctaaaaacatagaaaaattagccgggcatggtggcgtgcgcctgtaatcccagctactcgggaggctgaggtgagagaattacttgaacccgggaggcggaggttgcagtgagcccagattgcaccactgcactccagcctgggcgacagagcaagactccatctcaaaaaaagctctcagaacaaccaggtttacaaatttggtcagttggtaaataaactgggtttcaaacatactttgctgaaacaatcactgactaaataggaaatgaatcttttttttttttaagctggcaagctggtctgtaggacctgataagtactcacttcatttctctgtgtctcaggtttcccatttttaggtgagaattaaggggctctgataaaacagaccctaggattgtggacagcagtgatagtcctagagtccacaagtctgcttttgagtgatgggcccatgtatctggcacatctgcaggcagagcgtggttctggctcttcagatgatgccggtggagcactttgaggagtcctcaccccaccgtgataaccagacattaaaatcttggggctttgcatcccaggatttctctgtgattccttctagacttgtggcatcatggcagcatcactgctgtagatttctagtcacttggttctcaggagccgtttatttaatggcttcacatttaatttcagtgaacaaggtagtggcattgctcttcacagggccgtcctgttgtccacaggttccagattgactgttgccccttatctatgtgaacagtcacaactgaggcaggtttctgttgtttacaggacagttctgcagatcgatttctcaacagcttgggaagatttatgacaggactggacaccaaaaataatgtcaaggtaaaccgctgtctttgttctagtagctttttgatgaacaataatccttatgtttcctggagtactttcaactcatggtaaagttggcaggggcattcacaacagaaaagagcaaactattaactttaccagtgaggcagtacggtgtagtgtagtgattcagagaatttgctttgccaccagacataccaggtaaccttgactaagttacttaacctatctaaacctcagttccctcatctgtgaaatggagacagtaatcatagctatttccaaactgttgtgagaattcaatgagttaaaggtataaggtcctcaccacagcgcctgcccacatagtcagtgatcactatgtcctgaacactgtaattacttcgccatattctctgatcatagtgttttgccttggtatgtgactagaatttctttctgaggtttatgggcatggttggtgggtatgcacctgcctgcaggagcccggtttgggggcattaccttgtacctggtatgttttctttcaggtgtggttcaataacaagggctggcatgcaatcagctctttcctgaatgtcatcaacaatgccattctccgggccaacctgcaaaagggagagaaccctagccattatggaattactgctttcaatcatcccctgaatctcaccaagcagcagctctcagaggtggctctgtaagtgtggctgtgtctgtatagatggagtggggcaagggagagggttatggagaaggggagaaaaatgtgaatctcattgtaggggaacagctgcagagaccgttatattatgataaatctggattgatccaggctctgggcagaagtgataagtttacgaattggctggttgggcttcttgaactgcagaagagaaaatgacactgatatgtaaaaatcgtaacatttagtgaattcatataaagtgagttcaaaaattgttaattaaattataatttaattataagtgtttaatcagtttgatttgtttaaaaaccactgttttaaatttggtggaatatgtttttattagcttgtatctttaattcctaaattaagctgtgtgtgtgtgtgtgtgtgtgtgtgtgtgtgtgtgtgtgtgaagtttaaagccaggatgagctagtttaaagtatgcagcctttggagtcatacagatctgggtttgaatctggtctctaaactttatagatgtatgatattaaatgaggcagttcatgtaaattgccaagcccagcactcagcacagagttgatatttcacacacattagatacctttcctgtatgtggagcatggcagttcctgtttctgctttactcctacaggatactaatataggacactaggatctttataccaagaccccatgtaatgggcttatgagaccattcttcttataaaaatctgacagaatttttgtatgtgttagatcaataggctgcatactgttattttcaagttgatttacagccagaaatattaatttatttgagtagttacagagtaatatttctgctctcatttagttttcaagccccactagtcctttgtgtgtgaaaatttacaacttactgctcttacaaggtcatgaacagtggaccaaagtgaatgccattaaccactctgacttccttcattagttttattgtgacagtggactcttttgacctcagtaataccagtttggcatttacattgtcatatttttagacttaaaaatgatcatcttaaccctgaataaaatgtgtctggtgaacagatgtttttccttgggctgtgcctcagatatctctgtgtgtgtgtacgtgtgtgtttgtctgtgtgtccatgtcctcactgattgagccctaactgcatcaaagacccctcagattttcacacgctttttctctccaggatgaccacatcagtggatgtccttgtgtccatctgtgtcatctttgcaatgtccttcgtcccagcca

SEQ ID NO: 703 - DNA, 4046 bp, Homo sapiens
gagccttctagcttcccaggacatggcagcctagtgttgaatgcttggctcagcaaatgtttgttctcgtttccttcccatcaacttggtcagttggggtctttcagttaggagtatctcagtgactttaaatggcatgggcatgctggagtgatagtgaccatgagtttctaagaaagaagcataatttctccatatgtcatccacaattgaaatattattgttaattgaaaaagcttctaggccaggcacggtggctcatgcctgtaatcccagcactttaggaggccaaggcgggtggatcacttgaggtcaggagtttgagaccagcctggccaacatggggaaaccctgtctctactaaaaatacaaaataagctgggcgtggtggtgcgtgcctgtaatcccagctacttgggaggctgaggcaggagaattgcttgaatctgggaggcggaggttgcagtgagctgagttcatgccattgcattccagcctgggcaacaagagcgaaaccatctcccaaaagaaaaaaaaaagaaagaaaaagcttctagtttggttacatcttggtctataaggtggtttgtaaattggtttaacccaaggcctggttctcatataagtaatagggtatttatgatggagagaaggctggaagaggcctgaacacaggcttcttttctctagcacaaccctacaaggccagctgattctagggttatttctgtccgttccttatatcctcaggtggatatttactccttttgcatcattaggaataggctcagtgctttctttgaactgattttttgtttctttgtctctgcagcttaaagaacaagatctgggtgaatgagtttaggtaagttgctgtctttctggcacgtttagctcagggggaggatggtgttgtaggtgtcttggattgaagaaagccttggggattgtttgtcactcacacacttgtgggtgccatctcactgtgaggaggacagaagccctgtgaacatgtggagcacacaggggcacagacagatttagattaggcctgctttatagagtttctgcctagagcatcatggctcagtgcccagcagcccctccagaggcctctgaaatatttgatatactgatttccttgaggagaatcagaaatctcctgcaggtgtctagggatttcaagtaagtagtgttgtgaggggaatacctacttgtactttccccccaaaccagattcccgaggcttcttaaggactcaaggacaatttctaggcatttagcacgggactaaaaaggtcttagaggaaataagaagcgccaaaaccatctctttgcactgtatttcaacccatttgtccttctgggttttgaaggaacaggtgggactggggacagaagagttcttgaagccagtttgtccatcatggaaaatgagataggtgatgtggctacgtcagggggcccgaaggctccttgttactgatttccgtcttttctctctgccttttccccaagggccaggacccctggatctctgggcagagcagacgcaggcccctataatagccctcatgctagaaaggagccggagcctgtgtataaggccagcgcagcctactctggacagtgcagggttcccactctcccaactccccatctgcttgcctccagacccacattcacacacgagccactgggttggaggagcatctgtgagatgaaacaccattctttcctcaatgtctcagctatctaactgtgtgtgtaatcaggccaggtcctccctgctgggcagaaaccatgggagttaagagattgccaacatttattagaggaagctgacgtgtaacttctctgaggcaaaatttagccctcctttgaacaggaatttgactcagtgaaccttgtacacactcgcactgagtctgctgctgatgatactgtgcaccccactgtctgggttttaatgtcaggctgttcttttaggtatggcggcttttccctgggtgtcagtaatactcaagcacttcctccgagtcaagaagttaatgatgccatcaaacaaatgaagaaacacctaaagctggccaaggtaaaatatctatcgtaagatgtatcagaaaaatgggcatgtagctgctgggatataggagtagttggcaggttaaacggatcacctggcagctcattgttctgaatatgttggcatacagagccgtctttggcatttagcgatttgagccagacaaaactgaattacttagttgtacgtttaaaagtgtaggtcaaaaacaaatccagaggccaggagctgtggctcatgcctgtaatcctagcactttgggaggccgaagcgggtggatcacttgaggtcaggagttcgagaccagcctggcctacatgacaaaaccccgtatctactaaaaatacaaaaaaattagctgggcttggtggcacacacctgtaatcccagctacttgggaggctgaggcaggagaattgcttgaaccctgtaggaagaggttgtagtgagccaagatcgcaccgttgcactccagcctgggcaacaagagcaaaactccatctcaaaaaacaaattaaatccagagatttaaaagctctcagaggctgggcgcggtggcttacacctgttatcccagcattttgggatgccgaggcgggcaaagcacaaggtcaggagtttgagaccagcctggccaacatagtgaaaccctgtctctgctaaaaacatagaaaaattagccgggcatggtggcgtgcgcctgtaatcccagctactcgggaggctgaggtgagagaattacttgaacccgggaggcggaggttgcagtgagcccagattgcaccactgcactccagcctgggcgacagagcaagactccatctcaaaaaaagctctcagaacaaccaggtttacaaatttggtcagttggtaaataaactgggtttcaaacatactttgctgaaacaatcactgactaaataggaaatgaatcttttttttttttaagctggcaagctggtctgtaggacctgataagtactcacttcatttctctgtgtctcaggtttcccatttttaggtgagaattaaggggctctgataaaacagaccctaggattgtggacagcagtgatagtcctagagtccacaagtctgcttttgagtgatgggcccatgtatctggcacatctgcaggcagagcgtggttctggctcttcagatgatgccggtggagcactttgaggagtcctcaccccaccgtgataaccagacattaaaatcttggggctttgcatcccaggatttctctgtgattccttctagacttgtggcatcatggcagcatcactgctgtagatttctagtcacttggttctcaggagccgtttatttaatggcttcacatttaatttcagtgaacaaggtagtggcattgctcttcacagggccgtcctgttgtccacaggttccagattgactgttgccccttatctatgtgaacagtcacaactgaggcaggtttctgttgtttacaggacagttctgcagatcgatttctcaacagcttgggaagatttatgacaggactggacaccaaaaataatgtcaaggtaaaccgctgtctttgttctagtagctttttgatgaacaataatccttatgtttcctggagtactttcaactcatggtaaagttggcaggggcattcacaacagaaaagagcaaactattaactttaccagtgaggcagtacggtgtagtgtagtgattcagagaatttgctttgccaccagacataccaggtaaccttgactaagttacttaacctatctaaacctcagttccctcatctgtgaaatggagacagtaatcatagctatttccaaactgttgtgagaattcaatgagttaaaggtataaggtcctcaccacagcgcctgcccacatagtcagtgatcactatgtcctgaacactgtaattacttcgccatattctctgatcatagtgttttgcctt

SEQ ID NO: 704 - DNA, 4047 bp, Homo sapiens
attaatgttgctcttataagtttgtcatgaggactaaattaaatggtgtacatagagtgccttgggtactctctgatgggggactccatgataatttgtggtctcatggagggagctctgggaaggtttaggagcctgccttggctctgcagccttgggagagccttctagcttcccaggacatggcagcctagtgttgaatgcttggctcagcaaatgtttgttctcgtttccttcccatcaacttggtcagttggggtctttcagttaggagtatctcagtgactttaaatggcatgggcatgctggagtgatagtgaccatgagtttctaagaaagaagcataatttctccatatgtcatccacaattgaaatattattgttaattgaaaaagcttctaggccaggcacggtggctcatgcctgtaatcccagcactttaggaggccaaggcgggtggatcacttgaggtcaggagtttgagaccagcctggccaacatggggaaaccctgtctctactaaaaatacaaaataagctgggcgtggtggtgcgtgcctgtaatcccagctacttgggaggctgaggcaggagaattgcttgaatctgggaggcggaggttgcagtgagctgagttcatgccattgcattccagcctgggcaacaagagcgaaaccatctcccaaaagaaaaaaaaaagaaagaaaaagcttctagtttggttacatcttggtctataaggtggtttgtaaattggtttaacccaaggcctggttctcatataagtaatagggtatttatgatggagagaaggctggaagaggcctgaacacaggcttcttttctctagcacaaccctacaaggccagctgattctagggttatttctgtccgttccttatatcctcaggtggatatttactccttttgcatcattaggaataggctcagtgctttctttgaactgattttttgtttctttgtctctgcagcttaaagaacaagatctgggtgaatgagtttaggtaagttgctgtctttctggcacgtttagctcagggggaggatggtgttgtaggtgtcttggattgaagaaagccttggggattgtttgtcactcacacacttgtgggtgccatctcactgtgaggaggacagaagccctgtgaacatgtggagcacacaggggcacagacagatttagattaggcctgctttatagagtttctgcctagagcatcatggctcagtgcccagcagcccctccagaggcctctgaaatatttgatatactgatttccttgaggagaatcagaaatctcctgcaggtgtctagggatttcaagtaagtagtgttgtgaggggaatacctacttgtactttccccccaaaccagattcccgaggcttcttaaggactcaaggacaatttctaggcatttagcacgggactaaaaaggtcttagaggaaataagaagcgccaaaaccatctctttgcactgtatttcaacccatttgtccttctgggttttgaaggaacaggtgggactggggacagaagagttcttgaagccagtttgtccatcatggaaaatgagataggtgatgtggctacgtcagggggcccgaaggctccttgttactgatttccgtcttttctctctgccttttccccaagggccaggacccctggatctctgggcagagcagacgcaggcccctataatagccctcatgctagaaaggagccggagcctgtgtataaggccagcgcagcctactctggacagtgcagggttcccactctcccaactccccatctgcttgcctccagacccacattcacacacgagccactgggttggaggagcatctgtgagatgaaacaccattctttcctcaatgtctcagctatctaactgtgtgtgtaatcaggccaggtcctccctgctgggcagaaaccatgggagttaagagattgccaacatttattagaggaagctgacgtgtaacttctctgaggcaaaatttagccctcctttgaacaggaatttgactcagtgaaccttgtacacactcgcactgagtctgctgctgatgatactgtgcaccccactgtctgggttttaatgtcaggctgttcttttaggtatggcggcttttccctgggtgtcagtaatactcaagcacttcctccgagtcaagaagttaatgatgccatcaaacaaatgaagaaacacctaaagctggccaaggtaaaatatctatcgtaagatgtatcagaaaaatgggcatgtagctgctgggatataggagtagttggcaggttaaacggatcacctggcagctcattgttctgaatatgttggcatacagagccgtctttggcatttagcgatttgagccagacaaaactgaattacttagttgtacgtttaaaagtgtaggtcaaaaacaaatccagaggccaggagctgtggctcatgcctgtaatcctagcactttgggaggccgaagcgggtggatcacttgaggtcaggagttcgagaccagcctggcctacatgacaaaaccccgtatctactaaaaatacaaaaaaattagctgggcttggtggcacacacctgtaatcccagctacttgggaggctgaggcaggagaattgcttgaaccctgtaggaagaggttgtagtgagccaagatcgcaccgttgcactccagcctgggcaacaagagcaaaactccatctcaaaaaacaaattaaatccagagatttaaaagctctcagaggctgggcgcggtggcttacacctgttatcccagcattttgggatgccgaggcgggcaaagcacaaggtcaggagtttgagaccagcctggccaacatagtgaaaccctgtctctgctaaaaacatagaaaaattagccgggcatggtggcgtgcgcctgtaatcccagctactcgggaggctgaggtgagagaattacttgaacccgggaggcggaggttgcagtgagcccagattgcaccactgcactccagcctgggcgacagagcaagactccatctcaaaaaaagctctcagaacaaccaggtttacaaatttggtcagttggtaaataaactgggtttcaaacatactttgctgaaacaatcactgactaaataggaaatgaatcttttttttttttaagctggcaagctggtctgtaggacctgataagtactcacttcatttctctgtgtctcaggtttcccatttttaggtgagaattaaggggctctgataaaacagaccctaggattgtggacagcagtgatagtcctagagtccacaagtctgcttttgagtgatgggcccatgtatctggcacatctgcaggcagagcgtggttctggctcttcagatgatgccggtggagcactttgaggagtcctcaccccaccgtgataaccagacattaaaatcttggggctttgcatcccaggatttctctgtgattccttctagacttgtggcatcatggcagcatcactgctgtagatttctagtcacttggttctcaggagccgtttatttaatggcttcacatttaatttcagtgaacaaggtagtggcattgctcttcacagggccgtcctgttgtccacaggttccagattgactgttgccccttatctatgtgaacagtcacaactgaggcaggtttctgttgtttacaggacagttctgcagatcgatttctcaacagcttgggaagatttatgacaggactggacaccaaaaataatgtcaaggtaaaccgctgtctttgttctagtagctttttgatgaacaataatccttatgtttcctggagtactttcaactcatggtaaagttggcaggggcattcacaacagaaaagagcaaactattaactttaccagtgaggcagtacggtgtagtgtagtgattcagagaatttgctttgccaccagacataccaggtaaccttgactaagttacttaacctatctaaacctcagttccctcatctgtgaaa

SEQ ID NO: 705 - DNA, 4024 bp, Homo sapiens
gatcacctaaggtcaggagttcgaaaccagcttggccaatgtggcgaaaccctgtctctactaaaaattcaaaaattagccaggcatggtggcacatgcctgtaatcccagttacttgggaggctgaagcaggagaattgcttgaacctgggaggtggaggtcgcagggagccaaaattgcgccactgtactccagcctgagcaacacagcaaaactccatatcaaaaaataaaatgaataaaataacagctaatctagtcatcagtataactccagtgaacagaagatttattaggcatagtgaatgatggtgcttcctaaaaatctcttgactacaaagaatctcatttcaatgtttattgtttagatgttcagaataaattcttgggaaagaccttggcttggtgtaagtgaattaccagtgccgagggcagggtgaaccaagtctcagtgctggttgactgagggcagtgtctgggacctgtagtcaggtttccggtcacactgtggacatggtcactgttgtccttgatttgttttctgtttcaattcttgtctataaagacccgtatgcttggttttcatgtgatgacagagaaaacaaaacactgcagatatccttcaggacctgacaggaagaaacatttcggattatctggtgaagacgtatgtgcagatcatagccaaaaggtgactttttactaaacttggcccctgccgtattattactaattagaggaattaaagacctacaaataacagactgaaacagtgggggaaatgccagattatggcctgattctgtctattggaagtttaggatattatcccaaactagaaaagatgacgagagggactgtgaacattcagttgtcagcttcaaggctgaggcagcctggtctagaatgaaaatagaaatggattcaacgtcaaattttgccacttagtagcaacttgaccaggtaactggttatccttttaaagccttagtttatctaaattgtgatattaatgttgctcttataagtttgtcatgaggactaaattaaatggtgtacatagagtgccttgggtactctctgatgggggactccatgataatttgtggtctcatggagggagctctgggaaggtttaggagcctgccttggctctgcagccttgggagagccttctagcttcccaggacatggcagcctagtgttgaatgcttggctcagcaaatgtttgttctcgtttccttcccatcaacttggtcagttggggtctttcagttaggagtatctcagtgactttaaatggcatgggcatgctggagtgatagtgaccatgagtttctaagaaagaagcataatttctccatatgtcatccacaattgaaatattattgttaattgaaaaagcttctaggccaggcacggtggctcatgcctgtaatcccagcactttaggaggccaaggcgggtggatcacttgaggtcaggagtttgagaccagcctggccaacatggggaaaccctgtctctactaaaaatacaaaataagctgggcgtggtggtgcgtgcctgtaatcccagctacttgggaggctgaggcaggagaattgcttgaatctgggaggcggaggttgcagtgagctgagttcatgccattgcattccagcctgggcaacaagagcgaaaccatctcccaaaagaaaaaaaaaagaaagaaaaagcttctagtttggttacatcttggtctataaggtggtttgtaaattggtttaacccaaggcctggttctcatataagtaatagggtatttatgatggagagaaggctggaagaggcctgaacacaggcttcttttctctagcacaaccctacaaggccagctgattctagggttatttctgtccgttccttatatcctcaggtggatatttactccttttgcatcattaggaataggctcagtgctttctttgaactgattttttgtttctttgtctctgcagcttaaagaacaagatctgggtgaatgagtttaggtaagttgctgtctttctggcacgtttagctcagggggaggatggtgttgtaggtgtcttggattgaagaaagccttggggattgtttgtcactcacacacttgtgggtgccatctcactgtgaggaggacagaagccctgtgaacatgtggagcacacaggggcacagacagatttagattaggcctgctttatagagtttctgcctagagcatcatggctcagtgcccagcagcccctccagaggcctctgaaatatttgatatactgatttccttgaggagaatcagaaatctcctgcaggtgtctagggatttcaagtaagtagtgttgtgaggggaatacctacttgtactttccccccaaaccagattcccgaggcttcttaaggactcaaggacaatttctaggcatttagcacgggactaaaaaggtcttagaggaaataagaagcgccaaaaccatctctttgcactgtatttcaacccatttgtccttctgggttttgaaggaacaggtgggactggggacagaagagttcttgaagccagtttgtccatcatggaaaatgagataggtgatgtggctacgtcagggggcccgaaggctccttgttactgatttccgtcttttctctctgccttttccccaagggccaggacccctggatctctgggcagagcagacgcaggcccctataatagccctcatgctagaaaggagccggagcctgtgtataaggccagcgcagcctactctggacagtgcagggttcccactctcccaactccccatctgcttgcctccagacccacattcacacacgagccactgggttggaggagcatctgtgagatgaaacaccattctttcctcaatgtctcagctatctaactgtgtgtgtaatcaggccaggtcctccctgctgggcagaaaccatgggagttaagagattgccaacatttattagaggaagctgacgtgtaacttctctgaggcaaaatttagccctcctttgaacaggaatttgactcagtgaaccttgtacacactcgcactgagtctgctgctgatgatactgtgcaccccactgtctgggttttaatgtcaggctgttcttttaggtatggcggcttttccctgggtgtcagtaatactcaagcacttcctccgagtcaagaagttaatgatgccatcaaacaaatgaagaaacacctaaagctggccaaggtaaaatatctatcgtaagatgtatcagaaaaatgggcatgtagctgctgggatataggagtagttggcaggttaaacggatcacctggcagctcattgttctgaatatgttggcatacagagccgtctttggcatttagcgatttgagccagacaaaactgaattacttagttgtacgtttaaaagtgtaggtcaaaaacaaatccagaggccaggagctgtggctcatgcctgtaatcctagcactttgggaggccgaagcgggtggatcacttgaggtcaggagttcgagaccagcctggcctacatgacaaaaccccgtatctactaaaaatacaaaaaaattagctgggcttggtggcacacacctgtaatcccagctacttgggaggctgaggcaggagaattgcttgaaccctgtaggaagaggttgtagtgagccaagatcgcaccgttgcactccagcctgggcaacaagagcaaaactccatctcaaaaaacaaattaaatccagagatttaaaagctctcagaggctgggcgcggtggcttacacctgttatcccagcattttgggatgccgaggcgggcaaagcacaaggtcaggagtttgagaccagcctggccaacatagtgaaaccctgtctctgctaaaaacatagaaaaattagccgggcatggtggcgtgcgcctgtaatcccagctactcgggaggctgaggtgagagaattacttgaacccgggaggcggaggttgcagtg

SEQ ID NO: 706 - DNA, 4042 bp, Homo sapiens
ggttggttgattggattgaactgagttcagtatgtaaatatttagggcctctttgcattctattttacttatgtataaaatgatacataatgatgatataaatgatgtcacagtgtacaaggctgttgtgggatcaagcaatcaaatgagatcatgcttgtcttttccaaatggtgagggaatagatgcatgtttgtggttgttacggaatgatcctgtgctcctgaggcaacagaaaggccaggccatctctggtaatcctactcttgctgtcttccctttgcagagacacgccctgccaggcaggggaggaagagtggaccactgccccagttccccagaccatcatggacctcttccagaatgggaactggacaatgcagaacccttcacctgcatgccagtgtagcagcgacaaaatcaagaagatgctgcctgtgtgtcccccaggggcaggggggctgcctcctccacaagtgagtcactttcagggggtgattgggcagaaggggtgcaggatgggctggtagcttccgcttggaagcaggaatgagtgagatatcatgttgggagggtctgtttcagtcttttttgttttttgtttttttttctgaggcggagtcttgctctgtcgcccaggctggagtgctgtggcatgatcttgcctcactgcaacctccacctcccaggttcaagcgattctcctgcctcagcctcctgagtagctgggattacaggcacgcaccaccatgtctggctaatttttgtgtttttagtagagatagggtttcgccgtgttggctaggctggtctggaattcctgacctcaggtgatccacccgcctcggcctcccaaagtgctgggattacaggcgtgagccactacgcccagccctgtttcagtctttaactcgcttcttgtcataagaaaaagcatgtgagttttgaggggagaaggtttggaccacactgtgcccatgcctgtcccacagcagtaaagtcacaggacagactgtggcaggcctggcttccaatcttggctctgcaacaaatgagctggtagcctttgacaggcctgggcctgtttcttcacctctgaattagggaggctggaccagaaaactcctgtggatcttgtcaactctggtattcttagagactctgtttgggaaggagtcctgagccattttttttttcttgagaatttcaggaagaggagtgcttatgatagctctctgctgcttttatcagcaaccaaattgcaggatgaggacaagcaattctaaatgagtacaggaactaaaagaaggcttggttaccactcttgaaaataatagctagtccaggtgcggggtggctcacacctgtaatctcagtattttgggatgccgaggtggactgatcacctaaggtcaggagttcgaaaccagcttggccaatgtggcgaaaccctgtctctactaaaaattcaaaaattagccaggcatggtggcacatgcctgtaatcccagttacttgggaggctgaagcaggagaattgcttgaacctgggaggtggaggtcgcagggagccaaaattgcgccactgtactccagcctgagcaacacagcaaaactccatatcaaaaaataaaatgaataaaataacagctaatctagtcatcagtataactccagtgaacagaagatttattaggcatagtgaatgatggtgcttcctaaaaatctcttgactacaaagaatctcatttcaatgtttattgtttagatgttcagaataaattcttgggaaagaccttggcttggtgtaagtgaattaccagtgccgagggcagggtgaaccaagtctcagtgctggttgactgagggcagtgtctgggacctgtagtcaggtttccggtcacactgtggacatggtcactgttgtccttgatttgttttctgtttcaattcttgtctataaagacccgtatgcttggttttcatgtgatgacagagaaaacaaaacactgcagatatccttcaggacctgacaggaagaaacatttcggattatctggtgaagacgtatgtgcagatcatagccaaaaggtgactttttactaaacttggcccctgccgtattattactaattagaggaattaaagacctacaaataacagactgaaacagtgggggaaatgccagattatggcctgattctgtctattggaagtttaggatattatcccaaactagaaaagatgacgagagggactgtgaacattcagttgtcagcttcaaggctgaggcagcctggtctagaatgaaaatagaaatggattcaacgtcaaattttgccacttagtagcaacttgaccaggtaactggttatccttttaaagccttagtttatctaaattgtgatattaatgttgctcttataagtttgtcatgaggactaaattaaatggtgtacatagagtgccttgggtactctctgatgggggactccatgataatttgtggtctcatggagggagctctgggaaggtttaggagcctgccttggctctgcagccttgggagagccttctagcttcccaggacatggcagcctagtgttgaatgcttggctcagcaaatgtttgttctcgtttccttcccatcaacttggtcagttggggtctttcagttaggagtatctcagtgactttaaatggcatgggcatgctggagtgatagtgaccatgagtttctaagaaagaagcataatttctccatatgtcatccacaattgaaatattattgttaattgaaaaagcttctaggccaggcacggtggctcatgcctgtaatcccagcactttaggaggccaaggcgggtggatcacttgaggtcaggagtttgagaccagcctggccaacatggggaaaccctgtctctactaaaaatacaaaataagctgggcgtggtggtgcgtgcctgtaatcccagctacttgggaggctgaggcaggagaattgcttgaatctgggaggcggaggttgcagtgagctgagttcatgccattgcattccagcctgggcaacaagagcgaaaccatctcccaaaagaaaaaaaaaagaaagaaaaagcttctagtttggttacatcttggtctataaggtggtttgtaaattggtttaacccaaggcctggttctcatataagtaatagggtatttatgatggagagaaggctggaagaggcctgaacacaggcttcttttctctagcacaaccctacaaggccagctgattctagggttatttctgtccgttccttatatcctcaggtggatatttactccttttgcatcattaggaataggctcagtgctttctttgaactgattttttgtttctttgtctctgcagcttaaagaacaagatctgggtgaatgagtttaggtaagttgctgtctttctggcacgtttagctcagggggaggatggtgttgtaggtgtcttggattgaagaaagccttggggattgtttgtcactcacacacttgtgggtgccatctcactgtgaggaggacagaagccctgtgaacatgtggagcacacaggggcacagacagatttagattaggcctgctttatagagtttctgcctagagcatcatggctcagtgcccagcagcccctccagaggcctctgaaatatttgatatactgatttccttgaggagaatcagaaatctcctgcaggtgtctagggatttcaagtaagtagtgttgtgaggggaatacctacttgtactttccccccaaaccagattcccgaggcttcttaaggactcaaggacaatttctaggcatttagcacgggactaaaaaggtcttagaggaaataagaagcgccaaaaccatctctttgcactgtatttcaacccatttgtccttctgggttttgaaggaacaggtgggactggggacagaagagttcttgaagccagtttgtccatcatggaaaatgagataggtgatgtggctacgtcagggggcccgaaggct

SEQ ID NO: 707 - DNA, 4023 bp, Homo sapiens
gcctggcaattatatttaatatttaataataaggaaataattgctgtaactttactttaaattgtggaattctgaaactggaagggaactggaaatgacttgttgaatcaaatcattttaaacttttattttgccagtggaaaaaataagcccccaaaagagcaggggacctgctgatgtcccacagtaattcagagctggagatgaggttgaaggctttgtgtcttatctccagggaaaatttgtagacagcgtagctctttatgtgacgagcattctcaccccagtcatcccccaattctctactcatttgagaacataaattggatcttgccagtctctactcatttttcagcacatcgagcataagatccagactctttcccaggcctctctcatctggctcctctcctcctcctttatcattactcttcttcgtagcttatcctactccagccatgctgtcttcctattattcctaaaaaatagaaatgcatttcttcctagggcctttgtacctgcacttgccatcgcttttgctcagaatgttctttttgccaagcttttgcccagcttgttctccatcattgttatgttttggctgaaatgtcttctcttagtaggttcattctccccagtcactgtctttttattttgctttattttgggccatctaaggttatcttattagtgtatttgttgttcgtctcctccatgggcatacacctccatgaaggcaggtattttcaccttaggccctcgaatatactggacagcatctggcacgtagtagatgctcaacgaatgtttgttgtgtgagcaaatggttggttgattggattgaactgagttcagtatgtaaatatttagggcctctttgcattctattttacttatgtataaaatgatacataatgatgatataaatgatgtcacagtgtacaaggctgttgtgggatcaagcaatcaaatgagatcatgcttgtcttttccaaatggtgagggaatagatgcatgtttgtggttgttacggaatgatcctgtgctcctgaggcaacagaaaggccaggccatctctggtaatcctactcttgctgtcttccctttgcagagacacgccctgccaggcaggggaggaagagtggaccactgccccagttccccagaccatcatggacctcttccagaatgggaactggacaatgcagaacccttcacctgcatgccagtgtagcagcgacaaaatcaagaagatgctgcctgtgtgtcccccaggggcaggggggctgcctcctccacaagtgagtcactttcagggggtgattgggcagaaggggtgcaggatgggctggtagcttccgcttggaagcaggaatgagtgagatatcatgttgggagggtctgtttcagtcttttttgttttttgtttttttttctgaggcggagtcttgctctgtcgcccaggctggagtgctgtggcatgatcttgcctcactgcaacctccacctcccaggttcaagcgattctcctgcctcagcctcctgagtagctgggattacaggcacgcaccaccatgtctggctaatttttgtgtttttagtagagatagggtttcgccgtgttggctaggctggtctggaattcctgacctcaggtgatccacccgcctcggcctcccaaagtgctgggattacaggcgtgagccactacgcccagccctgtttcagtctttaactcgcttcttgtcataagaaaaagcatgtgagttttgaggggagaaggtttggaccacactgtgcccatgcctgtcccacagcagtaaagtcacaggacagactgtggcaggcctggcttccaatcttggctctgcaacaaatgagctggtagcctttgacaggcctgggcctgtttcttcacctctgaattagggaggctggaccagaaaactcctgtggatcttgtcaactctggtattcttagagactctgtttgggaaggagtcctgagccattttttttttcttgagaatttcaggaagaggagtgcttatgatagctctctgctgcttttatcagcaaccaaattgcaggatgaggacaagcaattctaaatgagtacaggaactaaaagaaggcttggttaccactcttgaaaataatagctagtccaggtgcggggtggctcacacctgtaatctcagtattttgggatgccgaggtggactgatcacctaaggtcaggagttcgaaaccagcttggccaatgtggcgaaaccctgtctctactaaaaattcaaaaattagccaggcatggtggcacatgcctgtaatcccagttacttgggaggctgaagcaggagaattgcttgaacctgggaggtggaggtcgcagggagccaaaattgcgccactgtactccagcctgagcaacacagcaaaactccatatcaaaaaataaaatgaataaaataacagctaatctagtcatcagtataactccagtgaacagaagatttattaggcatagtgaatgatggtgcttcctaaaaatctcttgactacaaagaatctcatttcaatgtttattgtttagatgttcagaataaattcttgggaaagaccttggcttggtgtaagtgaattaccagtgccgagggcagggtgaaccaagtctcagtgctggttgactgagggcagtgtctgggacctgtagtcaggtttccggtcacactgtggacatggtcactgttgtccttgatttgttttctgtttcaattcttgtctataaagacccgtatgcttggttttcatgtgatgacagagaaaacaaaacactgcagatatccttcaggacctgacaggaagaaacatttcggattatctggtgaagacgtatgtgcagatcatagccaaaaggtgactttttactaaacttggcccctgccgtattattactaattagaggaattaaagacctacaaataacagactgaaacagtgggggaaatgccagattatggcctgattctgtctattggaagtttaggatattatcccaaactagaaaagatgacgagagggactgtgaacattcagttgtcagcttcaaggctgaggcagcctggtctagaatgaaaatagaaatggattcaacgtcaaattttgccacttagtagcaacttgaccaggtaactggttatccttttaaagccttagtttatctaaattgtgatattaatgttgctcttataagtttgtcatgaggactaaattaaatggtgtacatagagtgccttgggtactctctgatgggggactccatgataatttgtggtctcatggagggagctctgggaaggtttaggagcctgccttggctctgcagccttgggagagccttctagcttcccaggacatggcagcctagtgttgaatgcttggctcagcaaatgtttgttctcgtttccttcccatcaacttggtcagttggggtctttcagttaggagtatctcagtgactttaaatggcatgggcatgctggagtgatagtgaccatgagtttctaagaaagaagcataatttctccatatgtcatccacaattgaaatattattgttaattgaaaaagcttctaggccaggcacggtggctcatgcctgtaatcccagcactttaggaggccaaggcgggtggatcacttgaggtcaggagtttgagaccagcctggccaacatggggaaaccctgtctctactaaaaatacaaaataagctgggcgtggtggtgcgtgcctgtaatcccagctacttgggaggctgaggcaggagaattgcttgaatctgggaggcggaggttgcagtgagctgagttcatgccattgcattccagcctgggcaacaagagcgaaaccatctcccaaaagaaaaaaaaaagaaagaaaaagcttctagtttggttacatcttggtctataaggtggtttgtaaattggtttaacccaaggcctggttctcatataagtaat

SEQ ID NO: 708 - DNA, 4048 bp, Homo sapiens
atcactggccagctgaaccatatgaactcatggattgatgctagcttaggaaggctctgtaggagccagaactgggctgagagccagcccatagagacaaaagaggcccggccctgacatcagagggttcaaacatgatgtctgagccccacctacagtctgccggaggtggttggaaggaagagcctttatccttacaattcttactgaaattcaaatttttaggttttgcaaaaaaatggtggacctgaaggaaatttgacaggagcatgtctcagctgtatttaaatttgtctcagccaatccccttttgaatgttcagagtgtaagcttcaggagggcagcgcgtcttagtgtgacttttctggtcagttcaggtgctttaaggagacaattagagatcaatctggaaaacttcatttgaatttttaatacataagaaaacaataagaaatagttaaaaatatatatttataatatatatatgtgtgtgtgtgtgtgtgtgtgtgtgtgtgtatatatatatattttatttatttatttttttttgagatggagtctcgctctgttgcccaggctggagtgcagtggctcaatcttggctcactgccacctctgcctcccaggttcaagtgattctcctacctcagcctcctgagtagctgggattacaagcatgtgccaccacactggctaatttttctaattttagtagagatggagtttcaccatgttggacaggatggtcttgaactcctgacttagtgatccacccgccttcgcctcccaaagttctgggattacaggcatgagccatcgtgcctggcaattatatttaatatttaataataaggaaataattgctgtaactttactttaaattgtggaattctgaaactggaagggaactggaaatgacttgttgaatcaaatcattttaaacttttattttgccagtggaaaaaataagcccccaaaagagcaggggacctgctgatgtcccacagtaattcagagctggagatgaggttgaaggctttgtgtcttatctccagggaaaatttgtagacagcgtagctctttatgtgacgagcattctcaccccagtcatcccccaattctctactcatttgagaacataaattggatcttgccagtctctactcatttttcagcacatcgagcataagatccagactctttcccaggcctctctcatctggctcctctcctcctcctttatcattactcttcttcgtagcttatcctactccagccatgctgtcttcctattattcctaaaaaatagaaatgcatttcttcctagggcctttgtacctgcacttgccatcgcttttgctcagaatgttctttttgccaagcttttgcccagcttgttctccatcattgttatgttttggctgaaatgtcttctcttagtaggttcattctccccagtcactgtctttttattttgctttattttgggccatctaaggttatcttattagtgtatttgttgttcgtctcctccatgggcatacacctccatgaaggcaggtattttcaccttaggccctcgaatatactggacagcatctggcacgtagtagatgctcaacgaatgtttgttgtgtgagcaaatggttggttgattggattgaactgagttcagtatgtaaatatttagggcctctttgcattctattttacttatgtataaaatgatacataatgatgatataaatgatgtcacagtgtacaaggctgttgtgggatcaagcaatcaaatgagatcatgcttgtcttttccaaatggtgagggaatagatgcatgtttgtggttgttacggaatgatcctgtgctcctgaggcaacagaaaggccaggccatctctggtaatcctactcttgctgtcttccctttgcagagacacgccctgccaggcaggggaggaagagtggaccactgccccagttccccagaccatcatggacctcttccagaatgggaactggacaatgcagaacccttcacctgcatgccagtgtagcagcgacaaaatcaagaagatgctgcctgtgtgtcccccaggggcaggggggctgcctcctccacaagtgagtcactttcagggggtgattgggcagaaggggtgcaggatgggctggtagcttccgcttggaagcaggaatgagtgagatatcatgttgggagggtctgtttcagtcttttttgttttttgtttttttttctgaggcggagtcttgctctgtcgcccaggctggagtgctgtggcatgatcttgcctcactgcaacctccacctcccaggttcaagcgattctcctgcctcagcctcctgagtagctgggattacaggcacgcaccaccatgtctggctaatttttgtgtttttagtagagatagggtttcgccgtgttggctaggctggtctggaattcctgacctcaggtgatccacccgcctcggcctcccaaagtgctgggattacaggcgtgagccactacgcccagccctgtttcagtctttaactcgcttcttgtcataagaaaaagcatgtgagttttgaggggagaaggtttggaccacactgtgcccatgcctgtcccacagcagtaaagtcacaggacagactgtggcaggcctggcttccaatcttggctctgcaacaaatgagctggtagcctttgacaggcctgggcctgtttcttcacctctgaattagggaggctggaccagaaaactcctgtggatcttgtcaactctggtattcttagagactctgtttgggaaggagtcctgagccattttttttttcttgagaatttcaggaagaggagtgcttatgatagctctctgctgcttttatcagcaaccaaattgcaggatgaggacaagcaattctaaatgagtacaggaactaaaagaaggcttggttaccactcttgaaaataatagctagtccaggtgcggggtggctcacacctgtaatctcagtattttgggatgccgaggtggactgatcacctaaggtcaggagttcgaaaccagcttggccaatgtggcgaaaccctgtctctactaaaaattcaaaaattagccaggcatggtggcacatgcctgtaatcccagttacttgggaggctgaagcaggagaattgcttgaacctgggaggtggaggtcgcagggagccaaaattgcgccactgtactccagcctgagcaacacagcaaaactccatatcaaaaaataaaatgaataaaataacagctaatctagtcatcagtataactccagtgaacagaagatttattaggcatagtgaatgatggtgcttcctaaaaatctcttgactacaaagaatctcatttcaatgtttattgtttagatgttcagaataaattcttgggaaagaccttggcttggtgtaagtgaattaccagtgccgagggcagggtgaaccaagtctcagtgctggttgactgagggcagtgtctgggacctgtagtcaggtttccggtcacactgtggacatggtcactgttgtccttgatttgttttctgtttcaattcttgtctataaagacccgtatgcttggttttcatgtgatgacagagaaaacaaaacactgcagatatccttcaggacctgacaggaagaaacatttcggattatctggtgaagacgtatgtgcagatcatagccaaaaggtgactttttactaaacttggcccctgccgtattattactaattagaggaattaaagacctacaaataacagactgaaacagtgggggaaatgccagattatggcctgattctgtctattggaagtttaggatattatcccaaactagaaaagatgacgagagggactgtgaacattcagttgtcagcttcaaggctgaggcagcctggtctagaatgaaaatagaaatggattcaacgtcaaattttgccacttagtagcaacttgaccaggtaactggttatccttttaaagccttagtttatctaaatt

SEQ ID NO: 709 - DNA, 4046 bp, Homo sapiens
agggaatggacttcagaattacacggtggaatgaattttactgctgcggctcaggtccctgtataagctaatactgcatgcatagaacagcagcgaactaaccctgaataataggccagtcttctgttgagcctttcagcctctctcctcttcatcctactgttgtcaggaacagccacatgtgttttaggtgaaataatccacccttgcaaaaatccatgattaagttataaaatatttggatttgtggagctgtgttttaattctgtaactgagtcacagggcacactgtcaaagcatagaacctccagagacttgttttctgcaaagtataattcatgtaattattatctattctgttatatttgggatgttaggtagtgtttgttctttagataaaaatatcccccactctgtaacaatacattaaatcaaagaaaaggacaaaggatttttctgggtcttgttagcaggagctttcttcagtcctgaaagatttgtagacctgtagatgggggaactgtgtcagtgatacaaaagggaagcatttaaaaaaaaaaaagtatatatatatatatatatatatatatgtaatgtgaattggcctctttttctctaagcccacattttcttcttacatagttcaggtttactttattttttcctttccggctgctgaccctgtattgcccgtagttgtggaacatagcatgtgtttgtgacctgtgcctgttatttttgtgctttctagttgtgcatgcaaagagtacaaagttttcttgccctttcttggaaaatcctgcttgtctgtgccaaagggataattgtgaaagcacttttgaaatacttaatgagttgattttcttcaaattaaaaaaaatatataaatgtatatgtgtatgtacatgtgtgtacacatacacacctttatacatacagcccatttaaaacaagctccactttggagtgctctacgtcaccctgatgccgaatacagggccagagtctgagatccttctgggtggtttctgtgttttgttcatttctgttttaagagcctgtcacagagaaatgcttcctaaaatgtttaatttataaaaacatttttatctctcgattactggttttaatgaattactaagctggctgcctctcatgtacccacagcaatgatgctcctgaggacacgggaaccctggaactcttaaacgccctcaccaaagaccctggcttcgggacccgctgtatggaaggaaacccaatcccgtgagtgccactttagccataagcaggcttcttgtgcttgttgcctggtttgatttctaatatgctgcatttatcaactgcatgccacattgtgaccgccagcatttgccctttgaattattattatgttttatttacaaaaagcgaaggtagtaaccgaactaaattatctaggaacaaacgtttggagagtcttctaacaccgtgcaaagcacgtcattacagacatttgtttactgatttagaaccttaatatttaatttaaatagcactttacacttactgatgaaatgcttttcctttctttctctcccagcccctgtacttaagtgcttcaataggctctcattatatatgatttttaggttttgcttatcagcttcttcgcttttataatctgaaaagatggcatatgaatttttataaaaagggacactttcttcttctcaaattgtatatttttattgtactttccttcaaaacccccttttaaaaagtaagcagtggataaataaattcagtgaagcatccatatgacccttaagtgagtgtaggggaagggaggtcaccagatcactgtgagtgaagatggtggagaggtgaggatcttatgaggccgtgctcaaggctggtagaggtgggttagtgtttccaggtttaggcagaatctcagctgaggtcatgaaacaacagtgatctctgaaaaattatggcaaggtgggaaggtgctggagaattggagagggggcaaacttgactttcaagtttcaatgggaagataggtgactctgcacaccacagaacagtgagcatgataacctgtttatacaaggttctagagcagatttctaaatggatagctactgtgtgcttgtttgttcttaattagtattggatagttactaaatacttgttagtacttagtacataatgggtggtaaatcctagcagctaatattggttcccaaataaccagatgacaaggatagagaaggacacagacacggcctatctggatttcatggtgcctttgattttccacatgaaggttgtgtagggaagatagaagcatgagatgagatgataatatagttatctggattcatcactggccagctgaaccatatgaactcatggattgatgctagcttaggaaggctctgtaggagccagaactgggctgagagccagcccatagagacaaaagaggcccggccctgacatcagagggttcaaacatgatgtctgagccccacctacagtctgccggaggtggttggaaggaagagcctttatccttacaattcttactgaaattcaaatttttaggttttgcaaaaaaatggtggacctgaaggaaatttgacaggagcatgtctcagctgtatttaaatttgtctcagccaatccccttttgaatgttcagagtgtaagcttcaggagggcagcgcgtcttagtgtgacttttctggtcagttcaggtgctttaaggagacaattagagatcaatctggaaaacttcatttgaatttttaatacataagaaaacaataagaaatagttaaaaatatatatttataatatatatatgtgtgtgtgtgtgtgtgtgtgtgtgtgtgtatatatatatattttatttatttatttttttttgagatggagtctcgctctgttgcccaggctggagtgcagtggctcaatcttggctcactgccacctctgcctcccaggttcaagtgattctcctacctcagcctcctgagtagctgggattacaagcatgtgccaccacactggctaatttttctaattttagtagagatggagtttcaccatgttggacaggatggtcttgaactcctgacttagtgatccacccgccttcgcctcccaaagttctgggattacaggcatgagccatcgtgcctggcaattatatttaatatttaataataaggaaataattgctgtaactttactttaaattgtggaattctgaaactggaagggaactggaaatgacttgttgaatcaaatcattttaaacttttattttgccagtggaaaaaataagcccccaaaagagcaggggacctgctgatgtcccacagtaattcagagctggagatgaggttgaaggctttgtgtcttatctccagggaaaatttgtagacagcgtagctctttatgtgacgagcattctcaccccagtcatcccccaattctctactcatttgagaacataaattggatcttgccagtctctactcatttttcagcacatcgagcataagatccagactctttcccaggcctctctcatctggctcctctcctcctcctttatcattactcttcttcgtagcttatcctactccagccatgctgtcttcctattattcctaaaaaatagaaatgcatttcttcctagggcctttgtacctgcacttgccatcgcttttgctcagaatgttctttttgccaagcttttgcccagcttgttctccatcattgttatgttttggctgaaatgtcttctcttagtaggttcattctccccagtcactgtctttttattttgctttattttgggccatctaaggttatcttattagtgtatttgttgttcgtctcctccatgggcatacacctccatgaaggcaggtattttcaccttaggccctcgaatatactggacagcatctggcacgtagtagatgctcaacgaatgtttgttgtgtgagcaaatggttggttgattggattgaactgagttcagt

SEQ ID NO: 710 - DNA, 4046 bp, Homo sapiens
agaaggaattggatatttattctttctgagactatcatgggagataatgactatggttgtccatgattggagccgttgctgtagagttggttttattatagtgtaggatttgaatgggccatgtgttctcagacctcagattaaaatgagaaaactgaggccagtggggagcgtgacttcacatgggtacacttgtgctagagacagaaccaggattcaggacttctggctcctggtcctgggttcatggcccaatgtagtctttctcagtcttcaggaggaggaagggcaggacccagtgttctgagtcaccctgaatgtgagcactatttacttcgtgaacttcttggcttagtgcctctgccaggtggccataacctctggccttgtgttgccagagaaaaggtttagttttcaggctccattgcttcccagctgccaagaatgccttggtgcagcacagtcataggccctgcattcctcattgccgtgctggttggtcggggaggtgggctggactcgtagggatttgccccttggccttgtttctaacacttgccgtttcctgctgtccccctgccccctccactgcctgggtaaagattgtcttgccagctgtgtttgtctgcattgcccttgtgttcagcctgatcgtgccaccctttggcaagtaccccagcctggaacttcagccctggatgtacaacgaacagtacacatttgtcaggtatgtttgtcttctacatcccaggagggggtaagattcgagcagaccaaagatgtttacgagggccaagggaatggacttcagaattacacggtggaatgaattttactgctgcggctcaggtccctgtataagctaatactgcatgcatagaacagcagcgaactaaccctgaataataggccagtcttctgttgagcctttcagcctctctcctcttcatcctactgttgtcaggaacagccacatgtgttttaggtgaaataatccacccttgcaaaaatccatgattaagttataaaatatttggatttgtggagctgtgttttaattctgtaactgagtcacagggcacactgtcaaagcatagaacctccagagacttgttttctgcaaagtataattcatgtaattattatctattctgttatatttgggatgttaggtagtgtttgttctttagataaaaatatcccccactctgtaacaatacattaaatcaaagaaaaggacaaaggatttttctgggtcttgttagcaggagctttcttcagtcctgaaagatttgtagacctgtagatgggggaactgtgtcagtgatacaaaagggaagcatttaaaaaaaaaaaagtatatatatatatatatatatatatatgtaatgtgaattggcctctttttctctaagcccacattttcttcttacatagttcaggtttactttattttttcctttccggctgctgaccctgtattgcccgtagttgtggaacatagcatgtgtttgtgacctgtgcctgttatttttgtgctttctagttgtgcatgcaaagagtacaaagttttcttgccctttcttggaaaatcctgcttgtctgtgccaaagggataattgtgaaagcacttttgaaatacttaatgagttgattttcttcaaattaaaaaaaatatataaatgtatatgtgtatgtacatgtgtgtacacatacacacctttatacatacagcccatttaaaacaagctccactttggagtgctctacgtcaccctgatgccgaatacagggccagagtctgagatccttctgggtggtttctgtgttttgttcatttctgttttaagagcctgtcacagagaaatgcttcctaaaatgtttaatttataaaaacatttttatctctcgattactggttttaatgaattactaagctggctgcctctcatgtacccacagcaatgatgctcctgaggacacgggaaccctggaactcttaaacgccctcaccaaagaccctggcttcgggacccgctgtatggaaggaaacccaatcccgtgagtgccactttagccataagcaggcttcttgtgcttgttgcctggtttgatttctaatatgctgcatttatcaactgcatgccacattgtgaccgccagcatttgccctttgaattattattatgttttatttacaaaaagcgaaggtagtaaccgaactaaattatctaggaacaaacgtttggagagtcttctaacaccgtgcaaagcacgtcattacagacatttgtttactgatttagaaccttaatatttaatttaaatagcactttacacttactgatgaaatgcttttcctttctttctctcccagcccctgtacttaagtgcttcaataggctctcattatatatgatttttaggttttgcttatcagcttcttcgcttttataatctgaaaagatggcatatgaatttttataaaaagggacactttcttcttctcaaattgtatatttttattgtactttccttcaaaacccccttttaaaaagtaagcagtggataaataaattcagtgaagcatccatatgacccttaagtgagtgtaggggaagggaggtcaccagatcactgtgagtgaagatggtggagaggtgaggatcttatgaggccgtgctcaaggctggtagaggtgggttagtgtttccaggtttaggcagaatctcagctgaggtcatgaaacaacagtgatctctgaaaaattatggcaaggtgggaaggtgctggagaattggagagggggcaaacttgactttcaagtttcaatgggaagataggtgactctgcacaccacagaacagtgagcatgataacctgtttatacaaggttctagagcagatttctaaatggatagctactgtgtgcttgtttgttcttaattagtattggatagttactaaatacttgttagtacttagtacataatgggtggtaaatcctagcagctaatattggttcccaaataaccagatgacaaggatagagaaggacacagacacggcctatctggatttcatggtgcctttgattttccacatgaaggttgtgtagggaagatagaagcatgagatgagatgataatatagttatctggattcatcactggccagctgaaccatatgaactcatggattgatgctagcttaggaaggctctgtaggagccagaactgggctgagagccagcccatagagacaaaagaggcccggccctgacatcagagggttcaaacatgatgtctgagccccacctacagtctgccggaggtggttggaaggaagagcctttatccttacaattcttactgaaattcaaatttttaggttttgcaaaaaaatggtggacctgaaggaaatttgacaggagcatgtctcagctgtatttaaatttgtctcagccaatccccttttgaatgttcagagtgtaagcttcaggagggcagcgcgtcttagtgtgacttttctggtcagttcaggtgctttaaggagacaattagagatcaatctggaaaacttcatttgaatttttaatacataagaaaacaataagaaatagttaaaaatatatatttataatatatatatgtgtgtgtgtgtgtgtgtgtgtgtgtgtgtatatatatatattttatttatttatttttttttgagatggagtctcgctctgttgcccaggctggagtgcagtggctcaatcttggctcactgccacctctgcctcccaggttcaagtgattctcctacctcagcctcctgagtagctgggattacaagcatgtgccaccacactggctaatttttctaattttagtagagatggagtttcaccatgttggacaggatggtcttgaactcctgacttagtgatccacccgccttcgcctcccaaagttctgggattacaggcatgagccatcgtgcctggcaattatatttaatatttaataataaggaaataattgctgtaactttactttaaa

SEQ ID NO: 711 - DNA, 4046 bp, Homo sapiens
atttttattttggaggagaacataaaaaggacaaagtgtagaaaaactggttgggtgtattcagctgtcataacatgagagttgttatgcccagatgcacttgacatgtgaatttattagaaacatgatttttctctgagttgatgtttaactcaaactgatagaaaagataggtcagaatatagttggccaacagagaagacttgttagactattgtctgcatgtcagtgtttgcatgctaacttgcttagttagaaaggttaaattttttcactctataaaatcaagaaatatagagaaaaggtctgcagagagtctttcatttgatgatgtggatattgttaagagcgggagtttggagcatacagagctcaagttgaatcctgactttgctacttattggctatatgaccttgggcaagctgcttagtctctctgatcctcagttacctttgtttgttgatgatgaccattgataacacaaccataaataatgacaacatagagatagttctcattatagtagttgttatacagaattattcactcaatgttaattttctgcattgaaatcccagaacattagaattgggggcattatttgaatctttaaggttataaggaatacatttctcagcaataaatggaaggagttttgggttaacttataaagtatacccaagtcatttttttttcagagaagatatggtagaaagtcttaggaggttgaagaaggaattggatatttattctttctgagactatcatgggagataatgactatggttgtccatgattggagccgttgctgtagagttggttttattatagtgtaggatttgaatgggccatgtgttctcagacctcagattaaaatgagaaaactgaggccagtggggagcgtgacttcacatgggtacacttgtgctagagacagaaccaggattcaggacttctggctcctggtcctgggttcatggcccaatgtagtctttctcagtcttcaggaggaggaagggcaggacccagtgttctgagtcaccctgaatgtgagcactatttacttcgtgaacttcttggcttagtgcctctgccaggtggccataacctctggccttgtgttgccagagaaaaggtttagttttcaggctccattgcttcccagctgccaagaatgccttggtgcagcacagtcataggccctgcattcctcattgccgtgctggttggtcggggaggtgggctggactcgtagggatttgccccttggccttgtttctaacacttgccgtttcctgctgtccccctgccccctccactgcctgggtaaagattgtcttgccagctgtgtttgtctgcattgcccttgtgttcagcctgatcgtgccaccctttggcaagtaccccagcctggaacttcagccctggatgtacaacgaacagtacacatttgtcaggtatgtttgtcttctacatcccaggagggggtaagattcgagcagaccaaagatgtttacgagggccaagggaatggacttcagaattacacggtggaatgaattttactgctgcggctcaggtccctgtataagctaatactgcatgcatagaacagcagcgaactaaccctgaataataggccagtcttctgttgagcctttcagcctctctcctcttcatcctactgttgtcaggaacagccacatgtgttttaggtgaaataatccacccttgcaaaaatccatgattaagttataaaatatttggatttgtggagctgtgttttaattctgtaactgagtcacagggcacactgtcaaagcatagaacctccagagacttgttttctgcaaagtataattcatgtaattattatctattctgttatatttgggatgttaggtagtgtttgttctttagataaaaatatcccccactctgtaacaatacattaaatcaaagaaaaggacaaaggatttttctgggtcttgttagcaggagctttcttcagtcctgaaagatttgtagacctgtagatgggggaactgtgtcagtgatacaaaagggaagcatttaaaaaaaaaaaagtatatatatatatatatatatatatatgtaatgtgaattggcctctttttctctaagcccacattttcttcttacatagttcaggtttactttattttttcctttccggctgctgaccctgtattgcccgtagttgtggaacatagcatgtgtttgtgacctgtgcctgttatttttgtgctttctagttgtgcatgcaaagagtacaaagttttcttgccctttcttggaaaatcctgcttgtctgtgccaaagggataattgtgaaagcacttttgaaatacttaatgagttgattttcttcaaattaaaaaaaatatataaatgtatatgtgtatgtacatgtgtgtacacatacacacctttatacatacagcccatttaaaacaagctccactttggagtgctctacgtcaccctgatgccgaatacagggccagagtctgagatccttctgggtggtttctgtgttttgttcatttctgttttaagagcctgtcacagagaaatgcttcctaaaatgtttaatttataaaaacatttttatctctcgattactggttttaatgaattactaagctggctgcctctcatgtacccacagcaatgatgctcctgaggacacgggaaccctggaactcttaaacgccctcaccaaagaccctggcttcgggacccgctgtatggaaggaaacccaatcccgtgagtgccactttagccataagcaggcttcttgtgcttgttgcctggtttgatttctaatatgctgcatttatcaactgcatgccacattgtgaccgccagcatttgccctttgaattattattatgttttatttacaaaaagcgaaggtagtaaccgaactaaattatctaggaacaaacgtttggagagtcttctaacaccgtgcaaagcacgtcattacagacatttgtttactgatttagaaccttaatatttaatttaaatagcactttacacttactgatgaaatgcttttcctttctttctctcccagcccctgtacttaagtgcttcaataggctctcattatatatgatttttaggttttgcttatcagcttcttcgcttttataatctgaaaagatggcatatgaatttttataaaaagggacactttcttcttctcaaattgtatatttttattgtactttccttcaaaacccccttttaaaaagtaagcagtggataaataaattcagtgaagcatccatatgacccttaagtgagtgtaggggaagggaggtcaccagatcactgtgagtgaagatggtggagaggtgaggatcttatgaggccgtgctcaaggctggtagaggtgggttagtgtttccaggtttaggcagaatctcagctgaggtcatgaaacaacagtgatctctgaaaaattatggcaaggtgggaaggtgctggagaattggagagggggcaaacttgactttcaagtttcaatgggaagataggtgactctgcacaccacagaacagtgagcatgataacctgtttatacaaggttctagagcagatttctaaatggatagctactgtgtgcttgtttgttcttaattagtattggatagttactaaatacttgttagtacttagtacataatgggtggtaaatcctagcagctaatattggttcccaaataaccagatgacaaggatagagaaggacacagacacggcctatctggatttcatggtgcctttgattttccacatgaaggttgtgtagggaagatagaagcatgagatgagatgataatatagttatctggattcatcactggccagctgaaccatatgaactcatggattgatgctagcttaggaaggctctgtaggagccagaactgggctgagagccagcccatagagacaaaagaggcccggccctgacatcagagggttcaaacatgatgtctgagcccc

SEQ ID NO: 712 - DNA, 4051 bp, Homo sapiens
ctttgtcatgaaagccctttacttctgagaaacttctagcttcagacacatgccttcaagatagttgttgaagacaccagaagaaggagcatggcaatgccgaaaacacctaagataataggtgaccttcagtgttggcttcttgcagaatccagagagacagacttgctcagtgggatggatggcaaagggtcctaccaggtgaaaggctggaaacttacacagcaacagtttgtggcccttttgtggaagagactgctaattgccagacggagtcggaaaggattttttgctcaggtgagacgtgctgttttcgccagagactctggcttcatgggtgggctgcaggctctgtgaccagtgaaggcaggatagcatcctggtcaagatatggatgccggagccagatttatctgtatttcaatcccagttctattccttgccagttgtgtatccgctggcaagttacttctctatgcctcaatctcctcatctgtaaaatggggataataatattacctgcaatacagggttgttacgaaaataaaaatgaataggtgcttagaatggggcctgacattagtaagtgcttagttttgtgtgtgtatatgttatttttattttggaggagaacataaaaaggacaaagtgtagaaaaactggttgggtgtattcagctgtcataacatgagagttgttatgcccagatgcacttgacatgtgaatttattagaaacatgatttttctctgagttgatgtttaactcaaactgatagaaaagataggtcagaatatagttggccaacagagaagacttgttagactattgtctgcatgtcagtgtttgcatgctaacttgcttagttagaaaggttaaattttttcactctataaaatcaagaaatatagagaaaaggtctgcagagagtctttcatttgatgatgtggatattgttaagagcgggagtttggagcatacagagctcaagttgaatcctgactttgctacttattggctatatgaccttgggcaagctgcttagtctctctgatcctcagttacctttgtttgttgatgatgaccattgataacacaaccataaataatgacaacatagagatagttctcattatagtagttgttatacagaattattcactcaatgttaattttctgcattgaaatcccagaacattagaattgggggcattatttgaatctttaaggttataaggaatacatttctcagcaataaatggaaggagttttgggttaacttataaagtatacccaagtcatttttttttcagagaagatatggtagaaagtcttaggaggttgaagaaggaattggatatttattctttctgagactatcatgggagataatgactatggttgtccatgattggagccgttgctgtagagttggttttattatagtgtaggatttgaatgggccatgtgttctcagacctcagattaaaatgagaaaactgaggccagtggggagcgtgacttcacatgggtacacttgtgctagagacagaaccaggattcaggacttctggctcctggtcctgggttcatggcccaatgtagtctttctcagtcttcaggaggaggaagggcaggacccagtgttctgagtcaccctgaatgtgagcactatttacttcgtgaacttcttggcttagtgcctctgccaggtggccataacctctggccttgtgttgccagagaaaaggtttagttttcaggctccattgcttcccagctgccaagaatgccttggtgcagcacagtcataggccctgcattcctcattgccgtgctggttggtcggggaggtgggctggactcgtagggatttgccccttggccttgtttctaacacttgccgtttcctgctgtccccctgccccctccactgcctgggtaaagattgtcttgccagctgtgtttgtctgcattgcccttgtgttcagcctgatcgtgccaccctttggcaagtaccccagcctggaacttcagccctggatgtacaacgaacagtacacatttgtcaggtatgtttgtcttctacatcccaggagggggtaagattcgagcagaccaaagatgtttacgagggccaagggaatggacttcagaattacacggtggaatgaattttactgctgcggctcaggtccctgtataagctaatactgcatgcatagaacagcagcgaactaaccctgaataataggccagtcttctgttgagcctttcagcctctctcctcttcatcctactgttgtcaggaacagccacatgtgttttaggtgaaataatccacccttgcaaaaatccatgattaagttataaaatatttggatttgtggagctgtgttttaattctgtaactgagtcacagggcacactgtcaaagcatagaacctccagagacttgttttctgcaaagtataattcatgtaattattatctattctgttatatttgggatgttaggtagtgtttgttctttagataaaaatatcccccactctgtaacaatacattaaatcaaagaaaaggacaaaggatttttctgggtcttgttagcaggagctttcttcagtcctgaaagatttgtagacctgtagatgggggaactgtgtcagtgatacaaaagggaagcatttaaaaaaaaaaaagtatatatatatatatatatatatatatgtaatgtgaattggcctctttttctctaagcccacattttcttcttacatagttcaggtttactttattttttcctttccggctgctgaccctgtattgcccgtagttgtggaacatagcatgtgtttgtgacctgtgcctgttatttttgtgctttctagttgtgcatgcaaagagtacaaagttttcttgccctttcttggaaaatcctgcttgtctgtgccaaagggataattgtgaaagcacttttgaaatacttaatgagttgattttcttcaaattaaaaaaaatatataaatgtatatgtgtatgtacatgtgtgtacacatacacacctttatacatacagcccatttaaaacaagctccactttggagtgctctacgtcaccctgatgccgaatacagggccagagtctgagatccttctgggtggtttctgtgttttgttcatttctgttttaagagcctgtcacagagaaatgcttcctaaaatgtttaatttataaaaacatttttatctctcgattactggttttaatgaattactaagctggctgcctctcatgtacccacagcaatgatgctcctgaggacacgggaaccctggaactcttaaacgccctcaccaaagaccctggcttcgggacccgctgtatggaaggaaacccaatcccgtgagtgccactttagccataagcaggcttcttgtgcttgttgcctggtttgatttctaatatgctgcatttatcaactgcatgccacattgtgaccgccagcatttgccctttgaattattattatgttttatttacaaaaagcgaaggtagtaaccgaactaaattatctaggaacaaacgtttggagagtcttctaacaccgtgcaaagcacgtcattacagacatttgtttactgatttagaaccttaatatttaatttaaatagcactttacacttactgatgaaatgcttttcctttctttctctcccagcccctgtacttaagtgcttcaataggctctcattatatatgatttttaggttttgcttatcagcttcttcgcttttataatctgaaaagatggcatatgaatttttataaaaagggacactttcttcttctcaaattgtatatttttattgtactttccttcaaaacccccttttaaaaagtaagcagtggataaataaattcagtgaagcatccatatgacccttaagtgagtgtaggggaagggaggtcaccagatcactgtgagtgaagatggtggagaggtgaggatcttatgaggccgtgctcaaggctggtagaggtgggttag

SEQ ID NO: 713 - DNA, 4030 bp, Homo sapiens
aagagtcagaaaggggaatttgctgttagagttaattgtaccctaagacttagatatttgaggctgggcatggtggctcatgccagtaatcccagcgctttgagaggctgaggtgggtagatcacctgaggtcaggagtttgagaccagtctgaccaacaaggtgaaaccccgtctctactaaatacaaaaaattagccgagtgtggtggcacatgcctgtcatcccagctacttgggaggctgaggcaggagaatcgcttgaacccaggaggcagaggttgcagtcagccacggttgcgccattgcactccagactgggcaacaagagtgaaaactccatctcaaaaaagaaaaaaaaagaattagatattttggatgagtgtgtctttgtgtgtttaactgagatggagaggagagctaagacatcaaacaaatattgttaagatgtaaaagcacatcagttaggtatcattagtttaggacaaggatttctagaaaatttttaggaacagaaaactttccagttctctcacccctgctcaaagagtgtatggctcttacattatatataactgcctgacttcatacagtatcagtacttagatcatttgaaatgtgtccacgttttaccaaaatataatagggtgagaagctgagatgctaattgccattgtgtattctcaaatatgtcaagctacgtacatggcctgtttcatagagtagtctataagaaattgatgacttgattcatccgaatggctggctgtaacacctggttacgcatgaacacctcttttcagttgtctcaagacacctttcttttctgtacttatcagacaaggactgaaaggcagagactgctactgttagacattttgagtcaagcttttccttggacatagctttgtcatgaaagccctttacttctgagaaacttctagcttcagacacatgccttcaagatagttgttgaagacaccagaagaaggagcatggcaatgccgaaaacacctaagataataggtgaccttcagtgttggcttcttgcagaatccagagagacagacttgctcagtgggatggatggcaaagggtcctaccaggtgaaaggctggaaacttacacagcaacagtttgtggcccttttgtggaagagactgctaattgccagacggagtcggaaaggattttttgctcaggtgagacgtgctgttttcgccagagactctggcttcatgggtgggctgcaggctctgtgaccagtgaaggcaggatagcatcctggtcaagatatggatgccggagccagatttatctgtatttcaatcccagttctattccttgccagttgtgtatccgctggcaagttacttctctatgcctcaatctcctcatctgtaaaatggggataataatattacctgcaatacagggttgttacgaaaataaaaatgaataggtgcttagaatggggcctgacattagtaagtgcttagttttgtgtgtgtatatgttatttttattttggaggagaacataaaaaggacaaagtgtagaaaaactggttgggtgtattcagctgtcataacatgagagttgttatgcccagatgcacttgacatgtgaatttattagaaacatgatttttctctgagttgatgtttaactcaaactgatagaaaagataggtcagaatatagttggccaacagagaagacttgttagactattgtctgcatgtcagtgtttgcatgctaacttgcttagttagaaaggttaaattttttcactctataaaatcaagaaatatagagaaaaggtctgcagagagtctttcatttgatgatgtggatattgttaagagcgggagtttggagcatacagagctcaagttgaatcctgactttgctacttattggctatatgaccttgggcaagctgcttagtctctctgatcctcagttacctttgtttgttgatgatgaccattgataacacaaccataaataatgacaacatagagatagttctcattatagtagttgttatacagaattattcactcaatgttaattttctgcattgaaatcccagaacattagaattgggggcattatttgaatctttaaggttataaggaatacatttctcagcaataaatggaaggagttttgggttaacttataaagtatacccaagtcatttttttttcagagaagatatggtagaaagtcttaggaggttgaagaaggaattggatatttattctttctgagactatcatgggagataatgactatggttgtccatgattggagccgttgctgtagagttggttttattatagtgtaggatttgaatgggccatgtgttctcagacctcagattaaaatgagaaaactgaggccagtggggagcgtgacttcacatgggtacacttgtgctagagacagaaccaggattcaggacttctggctcctggtcctgggttcatggcccaatgtagtctttctcagtcttcaggaggaggaagggcaggacccagtgttctgagtcaccctgaatgtgagcactatttacttcgtgaacttcttggcttagtgcctctgccaggtggccataacctctggccttgtgttgccagagaaaaggtttagttttcaggctccattgcttcccagctgccaagaatgccttggtgcagcacagtcataggccctgcattcctcattgccgtgctggttggtcggggaggtgggctggactcgtagggatttgccccttggccttgtttctaacacttgccgtttcctgctgtccccctgccccctccactgcctgggtaaagattgtcttgccagctgtgtttgtctgcattgcccttgtgttcagcctgatcgtgccaccctttggcaagtaccccagcctggaacttcagccctggatgtacaacgaacagtacacatttgtcaggtatgtttgtcttctacatcccaggagggggtaagattcgagcagaccaaagatgtttacgagggccaagggaatggacttcagaattacacggtggaatgaattttactgctgcggctcaggtccctgtataagctaatactgcatgcatagaacagcagcgaactaaccctgaataataggccagtcttctgttgagcctttcagcctctctcctcttcatcctactgttgtcaggaacagccacatgtgttttaggtgaaataatccacccttgcaaaaatccatgattaagttataaaatatttggatttgtggagctgtgttttaattctgtaactgagtcacagggcacactgtcaaagcatagaacctccagagacttgttttctgcaaagtataattcatgtaattattatctattctgttatatttgggatgttaggtagtgtttgttctttagataaaaatatcccccactctgtaacaatacattaaatcaaagaaaaggacaaaggatttttctgggtcttgttagcaggagctttcttcagtcctgaaagatttgtagacctgtagatgggggaactgtgtcagtgatacaaaagggaagcatttaaaaaaaaaaaagtatatatatatatatatatatatatatgtaatgtgaattggcctctttttctctaagcccacattttcttcttacatagttcaggtttactttattttttcctttccggctgctgaccctgtattgcccgtagttgtggaacatagcatgtgtttgtgacctgtgcctgttatttttgtgctttctagttgtgcatgcaaagagtacaaagttttcttgccctttcttggaaaatcctgcttgtctgtgccaaagggataattgtgaaagcacttttgaaatacttaatgagttgattttcttcaaattaaaaaaaatatataaatgtatatgtgtatgtacatgtgtgtacacatacacacctttatacatacagcccatttaaaacaagctccactttggagtgctctacgtcaccctgatgc

SEQ ID NO: 714 - DNA, 4054 bp, Homo sapiens
aactctgagaaagtgttattaagaaatgtggcttctactttctctgtcttacggggctaacatgccactcagtaatataataatcgtggcagtggtgactactctcgtaatgttggtgcttataatgttctcatctctctcattttccagatattcctcaaggtggccgaagagagtggggtggatgctgagacctcaggtaactgccttgagggagaatggcacacttaagatagtgccttctgctggctttctcagtgcacgagtattgttcctttccctttgaattgttctattgcattctcatttgtagagtgtaggtttgttgcagatggggaaggtttgttttgttgtaaataaaataaagtatgggattctttccttgtgccttcagatggtaccttgccagcaagacgaaacaggcgggccttcggggacaagcagagctgtcttcgcccgttcactgaagatgatgctgctgatccaaatgattctgacatagacccaggtctgttagggcaagatcaaacagtgtcctactgtttgaatgtgaaattctctctcatgctctcacctgttttctttggatggcctttagccaaggtgatagatccctacagagtccaaagagaagtgaggaaatggtaaaagccacttgttctttgcagcatcgtgcatgtgatcaaacctgaaagagcctatccatatcacttcctttaaagacataaagatggtgcctcaatcctctgaacccatgtatttattatcttttctgcggggtcctagtttcttgtatacattaggtgtttaattgttgaacaaatattcattcgagtagatgagtgattttgaaagagtcagaaaggggaatttgctgttagagttaattgtaccctaagacttagatatttgaggctgggcatggtggctcatgccagtaatcccagcgctttgagaggctgaggtgggtagatcacctgaggtcaggagtttgagaccagtctgaccaacaaggtgaaaccccgtctctactaaatacaaaaaattagccgagtgtggtggcacatgcctgtcatcccagctacttgggaggctgaggcaggagaatcgcttgaacccaggaggcagaggttgcagtcagccacggttgcgccattgcactccagactgggcaacaagagtgaaaactccatctcaaaaaagaaaaaaaaagaattagatattttggatgagtgtgtctttgtgtgtttaactgagatggagaggagagctaagacatcaaacaaatattgttaagatgtaaaagcacatcagttaggtatcattagtttaggacaaggatttctagaaaatttttaggaacagaaaactttccagttctctcacccctgctcaaagagtgtatggctcttacattatatataactgcctgacttcatacagtatcagtacttagatcatttgaaatgtgtccacgttttaccaaaatataatagggtgagaagctgagatgctaattgccattgtgtattctcaaatatgtcaagctacgtacatggcctgtttcatagagtagtctataagaaattgatgacttgattcatccgaatggctggctgtaacacctggttacgcatgaacacctcttttcagttgtctcaagacacctttcttttctgtacttatcagacaaggactgaaaggcagagactgctactgttagacattttgagtcaagcttttccttggacatagctttgtcatgaaagccctttacttctgagaaacttctagcttcagacacatgccttcaagatagttgttgaagacaccagaagaaggagcatggcaatgccgaaaacacctaagataataggtgaccttcagtgttggcttcttgcagaatccagagagacagacttgctcagtgggatggatggcaaagggtcctaccaggtgaaaggctggaaacttacacagcaacagtttgtggcccttttgtggaagagactgctaattgccagacggagtcggaaaggattttttgctcaggtgagacgtgctgttttcgccagagactctggcttcatgggtgggctgcaggctctgtgaccagtgaaggcaggatagcatcctggtcaagatatggatgccggagccagatttatctgtatttcaatcccagttctattccttgccagttgtgtatccgctggcaagttacttctctatgcctcaatctcctcatctgtaaaatggggataataatattacctgcaatacagggttgttacgaaaataaaaatgaataggtgcttagaatggggcctgacattagtaagtgcttagttttgtgtgtgtatatgttatttttattttggaggagaacataaaaaggacaaagtgtagaaaaactggttgggtgtattcagctgtcataacatgagagttgttatgcccagatgcacttgacatgtgaatttattagaaacatgatttttctctgagttgatgtttaactcaaactgatagaaaagataggtcagaatatagttggccaacagagaagacttgttagactattgtctgcatgtcagtgtttgcatgctaacttgcttagttagaaaggttaaattttttcactctataaaatcaagaaatatagagaaaaggtctgcagagagtctttcatttgatgatgtggatattgttaagagcgggagtttggagcatacagagctcaagttgaatcctgactttgctacttattggctatatgaccttgggcaagctgcttagtctctctgatcctcagttacctttgtttgttgatgatgaccattgataacacaaccataaataatgacaacatagagatagttctcattatagtagttgttatacagaattattcactcaatgttaattttctgcattgaaatcccagaacattagaattgggggcattatttgaatctttaaggttataaggaatacatttctcagcaataaatggaaggagttttgggttaacttataaagtatacccaagtcatttttttttcagagaagatatggtagaaagtcttaggaggttgaagaaggaattggatatttattctttctgagactatcatgggagataatgactatggttgtccatgattggagccgttgctgtagagttggttttattatagtgtaggatttgaatgggccatgtgttctcagacctcagattaaaatgagaaaactgaggccagtggggagcgtgacttcacatgggtacacttgtgctagagacagaaccaggattcaggacttctggctcctggtcctgggttcatggcccaatgtagtctttctcagtcttcaggaggaggaagggcaggacccagtgttctgagtcaccctgaatgtgagcactatttacttcgtgaacttcttggcttagtgcctctgccaggtggccataacctctggccttgtgttgccagagaaaaggtttagttttcaggctccattgcttcccagctgccaagaatgccttggtgcagcacagtcataggccctgcattcctcattgccgtgctggttggtcggggaggtgggctggactcgtagggatttgccccttggccttgtttctaacacttgccgtttcctgctgtccccctgccccctccactgcctgggtaaagattgtcttgccagctgtgtttgtctgcattgcccttgtgttcagcctgatcgtgccaccctttggcaagtaccccagcctggaacttcagccctggatgtacaacgaacagtacacatttgtcaggtatgtttgtcttctacatcccaggagggggtaagattcgagcagaccaaagatgtttacgagggccaagggaatggacttcagaattacacggtggaatgaattttactgctgcggctcaggtccctgtataagctaatactgcatgcatagaacagcagcgaactaaccctgaataataggccagtcttctgttgagcctttcagcctctctcctcttcatcctac

SEQ ID NO: 715 - DNA, 4062 bp, Homo sapiens
tagcttgatagctctcaccactgaggaaatgttctctggcaaaaacggcttctctcccaggtaactctgagaaagtgttattaagaaatgtggcttctactttctctgtcttacggggctaacatgccactcagtaatataataatcgtggcagtggtgactactctcgtaatgttggtgcttataatgttctcatctctctcattttccagatattcctcaaggtggccgaagagagtggggtggatgctgagacctcaggtaactgccttgagggagaatggcacacttaagatagtgccttctgctggctttctcagtgcacgagtattgttcctttccctttgaattgttctattgcattctcatttgtagagtgtaggtttgttgcagatggggaaggtttgttttgttgtaaataaaataaagtatgggattctttccttgtgccttcagatggtaccttgccagcaagacgaaacaggcgggccttcggggacaagcagagctgtcttcgcccgttcactgaagatgatgctgctgatccaaatgattctgacatagacccaggtctgttagggcaagatcaaacagtgtcctactgtttgaatgtgaaattctctctcatgctctcacctgttttctttggatggcctttagccaaggtgatagatccctacagagtccaaagagaagtgaggaaatggtaaaagccacttgttctttgcagcatcgtgcatgtgatcaaacctgaaagagcctatccatatcacttcctttaaagacataaagatggtgcctcaatcctctgaacccatgtatttattatcttttctgcggggtcctagtttcttgtatacattaggtgtttaattgttgaacaaatattcattcgagtagatgagtgattttgaaagagtcagaaaggggaatttgctgttagagttaattgtaccctaagacttagatatttgaggctgggcatggtggctcatgccagtaatcccagcgctttgagaggctgaggtgggtagatcacctgaggtcaggagtttgagaccagtctgaccaacaaggtgaaaccccgtctctactaaatacaaaaaattagccgagtgtggtggcacatgcctgtcatcccagctacttgggaggctgaggcaggagaatcgcttgaacccaggaggcagaggttgcagtcagccacggttgcgccattgcactccagactgggcaacaagagtgaaaactccatctcaaaaaagaaaaaaaaagaattagatattttggatgagtgtgtctttgtgtgtttaactgagatggagaggagagctaagacatcaaacaaatattgttaagatgtaaaagcacatcagttaggtatcattagtttaggacaaggatttctagaaaatttttaggaacagaaaactttccagttctctcacccctgctcaaagagtgtatggctcttacattatatataactgcctgacttcatacagtatcagtacttagatcatttgaaatgtgtccacgttttaccaaaatataatagggtgagaagctgagatgctaattgccattgtgtattctcaaatatgtcaagctacgtacatggcctgtttcatagagtagtctataagaaattgatgacttgattcatccgaatggctggctgtaacacctggttacgcatgaacacctcttttcagttgtctcaagacacctttcttttctgtacttatcagacaaggactgaaaggcagagactgctactgttagacattttgagtcaagcttttccttggacatagctttgtcatgaaagccctttacttctgagaaacttctagcttcagacacatgccttcaagatagttgttgaagacaccagaagaaggagcatggcaatgccgaaaacacctaagataataggtgaccttcagtgttggcttcttgcagaatccagagagacagacttgctcagtgggatggatggcaaagggtcctaccaggtgaaaggctggaaacttacacagcaacagtttgtggcccttttgtggaagagactgctaattgccagacggagtcggaaaggattttttgctcaggtgagacgtgctgttttcgccagagactctggcttcatgggtgggctgcaggctctgtgaccagtgaaggcaggatagcatcctggtcaagatatggatgccggagccagatttatctgtatttcaatcccagttctattccttgccagttgtgtatccgctggcaagttacttctctatgcctcaatctcctcatctgtaaaatggggataataatattacctgcaatacagggttgttacgaaaataaaaatgaataggtgcttagaatggggcctgacattagtaagtgcttagttttgtgtgtgtatatgttatttttattttggaggagaacataaaaaggacaaagtgtagaaaaactggttgggtgtattcagctgtcataacatgagagttgttatgcccagatgcacttgacatgtgaatttattagaaacatgatttttctctgagttgatgtttaactcaaactgatagaaaagataggtcagaatatagttggccaacagagaagacttgttagactattgtctgcatgtcagtgtttgcatgctaacttgcttagttagaaaggttaaattttttcactctataaaatcaagaaatatagagaaaaggtctgcagagagtctttcatttgatgatgtggatattgttaagagcgggagtttggagcatacagagctcaagttgaatcctgactttgctacttattggctatatgaccttgggcaagctgcttagtctctctgatcctcagttacctttgtttgttgatgatgaccattgataacacaaccataaataatgacaacatagagatagttctcattatagtagttgttatacagaattattcactcaatgttaattttctgcattgaaatcccagaacattagaattgggggcattatttgaatctttaaggttataaggaatacatttctcagcaataaatggaaggagttttgggttaacttataaagtatacccaagtcatttttttttcagagaagatatggtagaaagtcttaggaggttgaagaaggaattggatatttattctttctgagactatcatgggagataatgactatggttgtccatgattggagccgttgctgtagagttggttttattatagtgtaggatttgaatgggccatgtgttctcagacctcagattaaaatgagaaaactgaggccagtggggagcgtgacttcacatgggtacacttgtgctagagacagaaccaggattcaggacttctggctcctggtcctgggttcatggcccaatgtagtctttctcagtcttcaggaggaggaagggcaggacccagtgttctgagtcaccctgaatgtgagcactatttacttcgtgaacttcttggcttagtgcctctgccaggtggccataacctctggccttgtgttgccagagaaaaggtttagttttcaggctccattgcttcccagctgccaagaatgccttggtgcagcacagtcataggccctgcattcctcattgccgtgctggttggtcggggaggtgggctggactcgtagggatttgccccttggccttgtttctaacacttgccgtttcctgctgtccccctgccccctccactgcctgggtaaagattgtcttgccagctgtgtttgtctgcattgcccttgtgttcagcctgatcgtgccaccctttggcaagtaccccagcctggaacttcagccctggatgtacaacgaacagtacacatttgtcaggtatgtttgtcttctacatcccaggagggggtaagattcgagcagaccaaagatgtttacgagggccaagggaatggacttcagaattacacggtggaatgaattttactgctgcggctcaggtccctgtataagctaatactgcatgcatagaacagcagcgaactaaccctg

SEQ ID NO: 716 - DNA, 4067 bp, Homo sapiens
gggcatttctagttatggcatctcagagacgaccctggaagaagtaagttaagtggctgactgtcggaatatatagcaaggccaaatgtcctaaggccagaccagtagcctgcattgggagcaggattatcatggagttagtcattgagtttttaggtcatcgacatctgattaatgttggccccagtgagccatttaagatggtagtgggagatagcaggaaagaagtgttttcctctgtaccacagtacatgcctgagatttgtgtgttgaaaccagtggtacctaacacatttacatcccaaccttaaactcctatgcacttatttaccctttaatgagcctctttacttaagtacagtgtgaggaacagcggcatcaggatcacttgggaacttgttagaaattcagcaacttgggcccagctcagacctactgaatcagaatcaggagcaattctctggtgtgactgtgtcacagccaggtatcaactggattctcatacataggaaatgacaaacgtttatggatggatagtctacttgtgccaggtgctgagatttgttttttgttttttgatttttttttaatcactgtgacctcatttaattctcaaaaaaagatgaaaaaatgaacactcaggaatgctgacatgagattcagaatcaggggtttggggcttcaaagtccatcctctctttatccatgtaatgcctccccttagagatacaacatcacagaccttgaaggctgaaggggatataaaagctgtctggccaagtggtctccaagcttgacagtgcagcagaatcacctggggatattattaaaaataaacatactaaggtttggcttcagggcctgtgaatcagaatttctggaggtgaggccttgaagtctgtatttctattgcatactttggacacagtggtctatagactagagtttggaaatgattgcgctcattcagattctcttctgatgtttgaattgctgccatcatatttctagtgctctatttcctcctgctcattctgtcttggataacttatcatagtactagcctactcaaagatttagagccacagtcctgaaagaagccacttgactcattccctgtaggttcagaataaatttcttctgcgcagtgtctgtcatagctttttttaaatttttttttatttttgatgagactggagttttgctcttattgcccaagctggagtgcagtggtgcgattttggctcactgcaacctccacctcccaggttcaagcgattctcctgcctcagcctcccaagtagctgagattacaagcatgtgctaccacgcccagctaattttgtatttttagtagagatgggttttatccatgttggtcaggctggtctcgagctccagacctcaggtgatctgcccgcctcggcctcccaaagtgctgggattataggcctgagccacagcgctcagccataactttaatttgaaaatgattgtctagcttgatagctctcaccactgaggaaatgttctctggcaaaaacggcttctctcccaggtaactctgagaaagtgttattaagaaatgtggcttctactttctctgtcttacggggctaacatgccactcagtaatataataatcgtggcagtggtgactactctcgtaatgttggtgcttataatgttctcatctctctcattttccagatattcctcaaggtggccgaagagagtggggtggatgctgagacctcaggtaactgccttgagggagaatggcacacttaagatagtgccttctgctggctttctcagtgcacgagtattgttcctttccctttgaattgttctattgcattctcatttgtagagtgtaggtttgttgcagatggggaaggtttgttttgttgtaaataaaataaagtatgggattctttccttgtgccttcagatggtaccttgccagcaagacgaaacaggcgggccttcggggacaagcagagctgtcttcgcccgttcactgaagatgatgctgctgatccaaatgattctgacatagacccaggtctgttagggcaagatcaaacagtgtcctactgtttgaatgtgaaattctctctcatgctctcacctgttttctttggatggcctttagccaaggtgatagatccctacagagtccaaagagaagtgaggaaatggtaaaagccacttgttctttgcagcatcgtgcatgtgatcaaacctgaaagagcctatccatatcacttcctttaaagacataaagatggtgcctcaatcctctgaacccatgtatttattatcttttctgcggggtcctagtttcttgtatacattaggtgtttaattgttgaacaaatattcattcgagtagatgagtgattttgaaagagtcagaaaggggaatttgctgttagagttaattgtaccctaagacttagatatttgaggctgggcatggtggctcatgccagtaatcccagcgctttgagaggctgaggtgggtagatcacctgaggtcaggagtttgagaccagtctgaccaacaaggtgaaaccccgtctctactaaatacaaaaaattagccgagtgtggtggcacatgcctgtcatcccagctacttgggaggctgaggcaggagaatcgcttgaacccaggaggcagaggttgcagtcagccacggttgcgccattgcactccagactgggcaacaagagtgaaaactccatctcaaaaaagaaaaaaaaagaattagatattttggatgagtgtgtctttgtgtgtttaactgagatggagaggagagctaagacatcaaacaaatattgttaagatgtaaaagcacatcagttaggtatcattagtttaggacaaggatttctagaaaatttttaggaacagaaaactttccagttctctcacccctgctcaaagagtgtatggctcttacattatatataactgcctgacttcatacagtatcagtacttagatcatttgaaatgtgtccacgttttaccaaaatataatagggtgagaagctgagatgctaattgccattgtgtattctcaaatatgtcaagctacgtacatggcctgtttcatagagtagtctataagaaattgatgacttgattcatccgaatggctggctgtaacacctggttacgcatgaacacctcttttcagttgtctcaagacacctttcttttctgtacttatcagacaaggactgaaaggcagagactgctactgttagacattttgagtcaagcttttccttggacatagctttgtcatgaaagccctttacttctgagaaacttctagcttcagacacatgccttcaagatagttgttgaagacaccagaagaaggagcatggcaatgccgaaaacacctaagataataggtgaccttcagtgttggcttcttgcagaatccagagagacagacttgctcagtgggatggatggcaaagggtcctaccaggtgaaaggctggaaacttacacagcaacagtttgtggcccttttgtggaagagactgctaattgccagacggagtcggaaaggattttttgctcaggtgagacgtgctgttttcgccagagactctggcttcatgggtgggctgcaggctctgtgaccagtgaaggcaggatagcatcctggtcaagatatggatgccggagccagatttatctgtatttcaatcccagttctattccttgccagttgtgtatccgctggcaagttacttctctatgcctcaatctcctcatctgtaaaatggggataataatattacctgcaatacagggttgttacgaaaataaaaatgaataggtgcttagaatggggcctgacattagtaagtgcttagttttgtgtgtgtatatgttatttttattttggaggagaacataaaaaggacaaagtgtagaaaaactggttgggtgtattcagctgtcataacatgagagttgttatgcccagatgcacttgacatgtgaatttattagaaacatgatttttctctga

SEQ ID NO: 717 - DNA, 4046 bp, Homo sapiens
acctaaacacctggaacaggtgtggtgtatgagcggcaggcctctgatgagagggtgggggatggccagccctcactccgaagcccctctgagttgattgagccatctttgcattctggtccctgcagatgtctctgctatctccaacctcatcaggaagcatgtgtctgaagcccggctggtggaagacatagggcatgagctgacctatgtgctgccatatgaagctgctaaggagggagcctttgtggaactctttcatgagattgatgaccggctctcagacctgggcatttctagttatggcatctcagagacgaccctggaagaagtaagttaagtggctgactgtcggaatatatagcaaggccaaatgtcctaaggccagaccagtagcctgcattgggagcaggattatcatggagttagtcattgagtttttaggtcatcgacatctgattaatgttggccccagtgagccatttaagatggtagtgggagatagcaggaaagaagtgttttcctctgtaccacagtacatgcctgagatttgtgtgttgaaaccagtggtacctaacacatttacatcccaaccttaaactcctatgcacttatttaccctttaatgagcctctttacttaagtacagtgtgaggaacagcggcatcaggatcacttgggaacttgttagaaattcagcaacttgggcccagctcagacctactgaatcagaatcaggagcaattctctggtgtgactgtgtcacagccaggtatcaactggattctcatacataggaaatgacaaacgtttatggatggatagtctacttgtgccaggtgctgagatttgttttttgttttttgatttttttttaatcactgtgacctcatttaattctcaaaaaaagatgaaaaaatgaacactcaggaatgctgacatgagattcagaatcaggggtttggggcttcaaagtccatcctctctttatccatgtaatgcctccccttagagatacaacatcacagaccttgaaggctgaaggggatataaaagctgtctggccaagtggtctccaagcttgacagtgcagcagaatcacctggggatattattaaaaataaacatactaaggtttggcttcagggcctgtgaatcagaatttctggaggtgaggccttgaagtctgtatttctattgcatactttggacacagtggtctatagactagagtttggaaatgattgcgctcattcagattctcttctgatgtttgaattgctgccatcatatttctagtgctctatttcctcctgctcattctgtcttggataacttatcatagtactagcctactcaaagatttagagccacagtcctgaaagaagccacttgactcattccctgtaggttcagaataaatttcttctgcgcagtgtctgtcatagctttttttaaatttttttttatttttgatgagactggagttttgctcttattgcccaagctggagtgcagtggtgcgattttggctcactgcaacctccacctcccaggttcaagcgattctcctgcctcagcctcccaagtagctgagattacaagcatgtgctaccacgcccagctaattttgtatttttagtagagatgggttttatccatgttggtcaggctggtctcgagctccagacctcaggtgatctgcccgcctcggcctcccaaagtgctgggattataggcctgagccacagcgctcagccataactttaatttgaaaatgattgtctagcttgatagctctcaccactgaggaaatgttctctggcaaaaacggcttctctcccaggtaactctgagaaagtgttattaagaaatgtggcttctactttctctgtcttacggggctaacatgccactcagtaatataataatcgtggcagtggtgactactctcgtaatgttggtgcttataatgttctcatctctctcattttccagatattcctcaaggtggccgaagagagtggggtggatgctgagacctcaggtaactgccttgagggagaatggcacacttaagatagtgccttctgctggctttctcagtgcacgagtattgttcctttccctttgaattgttctattgcattctcatttgtagagtgtaggtttgttgcagatggggaaggtttgttttgttgtaaataaaataaagtatgggattctttccttgtgccttcagatggtaccttgccagcaagacgaaacaggcgggccttcggggacaagcagagctgtcttcgcccgttcactgaagatgatgctgctgatccaaatgattctgacatagacccaggtctgttagggcaagatcaaacagtgtcctactgtttgaatgtgaaattctctctcatgctctcacctgttttctttggatggcctttagccaaggtgatagatccctacagagtccaaagagaagtgaggaaatggtaaaagccacttgttctttgcagcatcgtgcatgtgatcaaacctgaaagagcctatccatatcacttcctttaaagacataaagatggtgcctcaatcctctgaacccatgtatttattatcttttctgcggggtcctagtttcttgtatacattaggtgtttaattgttgaacaaatattcattcgagtagatgagtgattttgaaagagtcagaaaggggaatttgctgttagagttaattgtaccctaagacttagatatttgaggctgggcatggtggctcatgccagtaatcccagcgctttgagaggctgaggtgggtagatcacctgaggtcaggagtttgagaccagtctgaccaacaaggtgaaaccccgtctctactaaatacaaaaaattagccgagtgtggtggcacatgcctgtcatcccagctacttgggaggctgaggcaggagaatcgcttgaacccaggaggcagaggttgcagtcagccacggttgcgccattgcactccagactgggcaacaagagtgaaaactccatctcaaaaaagaaaaaaaaagaattagatattttggatgagtgtgtctttgtgtgtttaactgagatggagaggagagctaagacatcaaacaaatattgttaagatgtaaaagcacatcagttaggtatcattagtttaggacaaggatttctagaaaatttttaggaacagaaaactttccagttctctcacccctgctcaaagagtgtatggctcttacattatatataactgcctgacttcatacagtatcagtacttagatcatttgaaatgtgtccacgttttaccaaaatataatagggtgagaagctgagatgctaattgccattgtgtattctcaaatatgtcaagctacgtacatggcctgtttcatagagtagtctataagaaattgatgacttgattcatccgaatggctggctgtaacacctggttacgcatgaacacctcttttcagttgtctcaagacacctttcttttctgtacttatcagacaaggactgaaaggcagagactgctactgttagacattttgagtcaagcttttccttggacatagctttgtcatgaaagccctttacttctgagaaacttctagcttcagacacatgccttcaagatagttgttgaagacaccagaagaaggagcatggcaatgccgaaaacacctaagataataggtgaccttcagtgttggcttcttgcagaatccagagagacagacttgctcagtgggatggatggcaaagggtcctaccaggtgaaaggctggaaacttacacagcaacagtttgtggcccttttgtggaagagactgctaattgccagacggagtcggaaaggattttttgctcaggtgagacgtgctgttttcgccagagactctggcttcatgggtgggctgcaggctctgtgaccagtgaaggcaggatagcatcctggtcaagatatggatgccggagccagatttatctgtatttcaatcccagttctattccttgc

SEQ ID NO: 718 - DNA, 4079 bp, Homo sapiens
ctgattcaaggtcacccagcaggtaaataacagtggtgggaccagacccaattaccaggtatgttttcctctgtaccgcagtacatgcctgagatttatttgtgtgttgaagccagtggtacctaatgtatttacatcccaacctgaaactcctatccacttatttaccttttaatgagcctcttaactcaagtgcagtctgaggaccagcagcatcaggatcacttgggaacttgttagaaattcagcaacctgggcccagctcagacctaccgaatcagaatctgtgcattttaacaaggttcttgagtggttgaacacacattaaagcatgagaagcattgaactagacatgtagccaggtaaaggccttgcctgagatggttggcaaaggcctcattgcagcattcattggcaggccacagttcttttggcagctctgcttcctgacctttcaccctcaggaagcgaggctgttcacacggcacacacatgccagacagggtcctctgaagccacggctgccagtgcatgtgtcccagggaaagctttttcctttagttctcacacaacagagcttcttggaagccctccccggcgaaggtgctggtggctctgccttgctccgtccctgacccgttctcacctccttctttgccatcaggaggacagtgtttctcagagcagttctgatgctggcctgggcagcgaccatgagagtgacacgctgaccatcggtaaggactctggggtttcttattcaggtggtgcctgagcttcccccagctgggcagagtggaggcagaggaggagaggtgcagaggctggtggcgctgactcaaggtttgctgctgggctggggctgggtggctgcgggtgtgggagcagcttggtggcgggttggcctaatgcttgctggggtgcctggggctcggtttgggagctagcagggcagtgtcccagagagctgagatgattggggtttggggaatcccttaggggagtggacactgaataccagggatgaggagctgagggccaagccaggagggtgggatttgagcttagtacataagaagagtgagagcccaggagatgaggaacagccttccagatttttcttgggtagcgtgtgtaggaggccagtgtcaccagtagcatatgtggaacagaagtcttgacccttgctatctctgcctagtcctaatggctggcttttcccaggaaggcttctgcttccatggactgttagattaaccctttatttaggtaaatgagggaacctactttataagcataggaaagggtgaagaatcttttaagattcctttactcaagttttcttttgaagaatcccagagcttaggcaatagacaccagactttgagcctcagttatccattcacccatccacccacccacccacccatccttccatcctcccatcctcccattcacccatccacccatccagctgtccacccattctacactgagtacctataatgtgcctggctttggtgatacaaaggtgaataagacatagtcctttcctttgcccccaaccctcagaccagagatgaacatgtggaatgacctaaacacctggaacaggtgtggtgtatgagcggcaggcctctgatgagagggtgggggatggccagccctcactccgaagcccctctgagttgattgagccatctttgcattctggtccctgcagatgtctctgctatctccaacctcatcaggaagcatgtgtctgaagcccggctggtggaagacatagggcatgagctgacctatgtgctgccatatgaagctgctaaggagggagcctttgtggaactctttcatgagattgatgaccggctctcagacctgggcatttctagttatggcatctcagagacgaccctggaagaagtaagttaagtggctgactgtcggaatatatagcaaggccaaatgtcctaaggccagaccagtagcctgcattgggagcaggattatcatggagttagtcattgagtttttaggtcatcgacatctgattaatgttggccccagtgagccatttaagatggtagtgggagatagcaggaaagaagtgttttcctctgtaccacagtacatgcctgagatttgtgtgttgaaaccagtggtacctaacacatttacatcccaaccttaaactcctatgcacttatttaccctttaatgagcctctttacttaagtacagtgtgaggaacagcggcatcaggatcacttgggaacttgttagaaattcagcaacttgggcccagctcagacctactgaatcagaatcaggagcaattctctggtgtgactgtgtcacagccaggtatcaactggattctcatacataggaaatgacaaacgtttatggatggatagtctacttgtgccaggtgctgagatttgttttttgttttttgatttttttttaatcactgtgacctcatttaattctcaaaaaaagatgaaaaaatgaacactcaggaatgctgacatgagattcagaatcaggggtttggggcttcaaagtccatcctctctttatccatgtaatgcctccccttagagatacaacatcacagaccttgaaggctgaaggggatataaaagctgtctggccaagtggtctccaagcttgacagtgcagcagaatcacctggggatattattaaaaataaacatactaaggtttggcttcagggcctgtgaatcagaatttctggaggtgaggccttgaagtctgtatttctattgcatactttggacacagtggtctatagactagagtttggaaatgattgcgctcattcagattctcttctgatgtttgaattgctgccatcatatttctagtgctctatttcctcctgctcattctgtcttggataacttatcatagtactagcctactcaaagatttagagccacagtcctgaaagaagccacttgactcattccctgtaggttcagaataaatttcttctgcgcagtgtctgtcatagctttttttaaatttttttttatttttgatgagactggagttttgctcttattgcccaagctggagtgcagtggtgcgattttggctcactgcaacctccacctcccaggttcaagcgattctcctgcctcagcctcccaagtagctgagattacaagcatgtgctaccacgcccagctaattttgtatttttagtagagatgggttttatccatgttggtcaggctggtctcgagctccagacctcaggtgatctgcccgcctcggcctcccaaagtgctgggattataggcctgagccacagcgctcagccataactttaatttgaaaatgattgtctagcttgatagctctcaccactgaggaaatgttctctggcaaaaacggcttctctcccaggtaactctgagaaagtgttattaagaaatgtggcttctactttctctgtcttacggggctaacatgccactcagtaatataataatcgtggcagtggtgactactctcgtaatgttggtgcttataatgttctcatctctctcattttccagatattcctcaaggtggccgaagagagtggggtggatgctgagacctcaggtaactgccttgagggagaatggcacacttaagatagtgccttctgctggctttctcagtgcacgagtattgttcctttccctttgaattgttctattgcattctcatttgtagagtgtaggtttgttgcagatggggaaggtttgttttgttgtaaataaaataaagtatgggattctttccttgtgccttcagatggtaccttgccagcaagacgaaacaggcgggccttcggggacaagcagagctgtcttcgcccgttcactgaagatgatgctgctgatccaaatgattctgacatagacccaggtctgttagggcaagatcaaacagtgtcctactgtttgaatgtgaaattctctctcatgctctcacctgttttctttggatggcctttagccaaggtgatagatccctacagagtccaaagagaagtg

SEQ ID NO: 719 - DNA, 4078 bp, Homo sapiens
ctctatcatctcaattaaagtgcagagagaccctgggaagaaggtaactatatttattatcccagatgagggaagtgaggcttgtagggaattggtagctgattcaaggtcacccagcaggtaaataacagtggtgggaccagacccaattaccaggtatgttttcctctgtaccgcagtacatgcctgagatttatttgtgtgttgaagccagtggtacctaatgtatttacatcccaacctgaaactcctatccacttatttaccttttaatgagcctcttaactcaagtgcagtctgaggaccagcagcatcaggatcacttgggaacttgttagaaattcagcaacctgggcccagctcagacctaccgaatcagaatctgtgcattttaacaaggttcttgagtggttgaacacacattaaagcatgagaagcattgaactagacatgtagccaggtaaaggccttgcctgagatggttggcaaaggcctcattgcagcattcattggcaggccacagttcttttggcagctctgcttcctgacctttcaccctcaggaagcgaggctgttcacacggcacacacatgccagacagggtcctctgaagccacggctgccagtgcatgtgtcccagggaaagctttttcctttagttctcacacaacagagcttcttggaagccctccccggcgaaggtgctggtggctctgccttgctccgtccctgacccgttctcacctccttctttgccatcaggaggacagtgtttctcagagcagttctgatgctggcctgggcagcgaccatgagagtgacacgctgaccatcggtaaggactctggggtttcttattcaggtggtgcctgagcttcccccagctgggcagagtggaggcagaggaggagaggtgcagaggctggtggcgctgactcaaggtttgctgctgggctggggctgggtggctgcgggtgtgggagcagcttggtggcgggttggcctaatgcttgctggggtgcctggggctcggtttgggagctagcagggcagtgtcccagagagctgagatgattggggtttggggaatcccttaggggagtggacactgaataccagggatgaggagctgagggccaagccaggagggtgggatttgagcttagtacataagaagagtgagagcccaggagatgaggaacagccttccagatttttcttgggtagcgtgtgtaggaggccagtgtcaccagtagcatatgtggaacagaagtcttgacccttgctatctctgcctagtcctaatggctggcttttcccaggaaggcttctgcttccatggactgttagattaaccctttatttaggtaaatgagggaacctactttataagcataggaaagggtgaagaatcttttaagattcctttactcaagttttcttttgaagaatcccagagcttaggcaatagacaccagactttgagcctcagttatccattcacccatccacccacccacccacccatccttccatcctcccatcctcccattcacccatccacccatccagctgtccacccattctacactgagtacctataatgtgcctggctttggtgatacaaaggtgaataagacatagtcctttcctttgcccccaaccctcagaccagagatgaacatgtggaatgacctaaacacctggaacaggtgtggtgtatgagcggcaggcctctgatgagagggtgggggatggccagccctcactccgaagcccctctgagttgattgagccatctttgcattctggtccctgcagatgtctctgctatctccaacctcatcaggaagcatgtgtctgaagcccggctggtggaagacatagggcatgagctgacctatgtgctgccatatgaagctgctaaggagggagcctttgtggaactctttcatgagattgatgaccggctctcagacctgggcatttctagttatggcatctcagagacgaccctggaagaagtaagttaagtggctgactgtcggaatatatagcaaggccaaatgtcctaaggccagaccagtagcctgcattgggagcaggattatcatggagttagtcattgagtttttaggtcatcgacatctgattaatgttggccccagtgagccatttaagatggtagtgggagatagcaggaaagaagtgttttcctctgtaccacagtacatgcctgagatttgtgtgttgaaaccagtggtacctaacacatttacatcccaaccttaaactcctatgcacttatttaccctttaatgagcctctttacttaagtacagtgtgaggaacagcggcatcaggatcacttgggaacttgttagaaattcagcaacttgggcccagctcagacctactgaatcagaatcaggagcaattctctggtgtgactgtgtcacagccaggtatcaactggattctcatacataggaaatgacaaacgtttatggatggatagtctacttgtgccaggtgctgagatttgttttttgttttttgatttttttttaatcactgtgacctcatttaattctcaaaaaaagatgaaaaaatgaacactcaggaatgctgacatgagattcagaatcaggggtttggggcttcaaagtccatcctctctttatccatgtaatgcctccccttagagatacaacatcacagaccttgaaggctgaaggggatataaaagctgtctggccaagtggtctccaagcttgacagtgcagcagaatcacctggggatattattaaaaataaacatactaaggtttggcttcagggcctgtgaatcagaatttctggaggtgaggccttgaagtctgtatttctattgcatactttggacacagtggtctatagactagagtttggaaatgattgcgctcattcagattctcttctgatgtttgaattgctgccatcatatttctagtgctctatttcctcctgctcattctgtcttggataacttatcatagtactagcctactcaaagatttagagccacagtcctgaaagaagccacttgactcattccctgtaggttcagaataaatttcttctgcgcagtgtctgtcatagctttttttaaatttttttttatttttgatgagactggagttttgctcttattgcccaagctggagtgcagtggtgcgattttggctcactgcaacctccacctcccaggttcaagcgattctcctgcctcagcctcccaagtagctgagattacaagcatgtgctaccacgcccagctaattttgtatttttagtagagatgggttttatccatgttggtcaggctggtctcgagctccagacctcaggtgatctgcccgcctcggcctcccaaagtgctgggattataggcctgagccacagcgctcagccataactttaatttgaaaatgattgtctagcttgatagctctcaccactgaggaaatgttctctggcaaaaacggcttctctcccaggtaactctgagaaagtgttattaagaaatgtggcttctactttctctgtcttacggggctaacatgccactcagtaatataataatcgtggcagtggtgactactctcgtaatgttggtgcttataatgttctcatctctctcattttccagatattcctcaaggtggccgaagagagtggggtggatgctgagacctcaggtaactgccttgagggagaatggcacacttaagatagtgccttctgctggctttctcagtgcacgagtattgttcctttccctttgaattgttctattgcattctcatttgtagagtgtaggtttgttgcagatggggaaggtttgttttgttgtaaataaaataaagtatgggattctttccttgtgccttcagatggtaccttgccagcaagacgaaacaggcgggccttcggggacaagcagagctgtcttcgcccgttcactgaagatgatgctgctgatccaaatgattctgacatagacccaggtctgttagggcaagatcaaacagtgtcc

SEQ ID NO: 720 - DNA, 4046 bp, Homo sapiens
ttccagcacgattcctcaaccattctaaccattccaaagggtatatctttggggggtgacattcttttcctgttttctttttaatctttttttaaaacatagaattaatatattatgagcttttcagaagatttttaaaaggcagtcagaaatcctactacctaacacaaaaattgtttttatctttgaataatatgttcttgtttgtccattttccatgcatgcgatgttaggcatacaaaatacattttttaaagaatactttcattgcagattggaaacttcgtttaaaaaatgctcatactaaaattggcatttctaacccataggcccacttgtagttatttaccgaagcaaaaggacagctttgctttgtgtgggtctggtagggttcattagaaaggaatgggggcggtgggagggttggtgttctgttctctctgcagactgaatggagcatctagagttaagggtaggtcaaccctgacttctgtacttctaaatttttgtcctcaggtcaatcctgaccgggttgttccccccgacctcgggcaccgcctacatcctgggaaaagacattcgctctgagatgagcaccatccggcagaacctgggggtctgtccccagcataacgtgctgtttgacatgtgagtaccagcagcacgttaagaataggccttttctggatgtgtgtgtgtcatgccatcatgggaggagtgggacttaagcattttactttgctgtgtttttgttttttctttttttcttttttatttttttgagatggagtctcgctctgtagccaggctggactgtagtggcgcgatctcggctcactgcaaccttggcctcccaggttcaagcgattctcctgcctcagcctcccgagtagctgggactctaggcacacaccaccatgcccagctaatttttgtgtttttagtagagacggggtttcaccatgttggccaggatggtctcaatgtcttgacctcgtgatccgcccacctcggtctcccaaagtgctgggaacacaggcatgagccactgtgtctggccacattttactttctttgaatatggcaggctcacctccgtgaacaccttgagacctagttgttctttgattttaggagaagtgggaggtgaatggttgagctgtagaggtgacatcagcccagccagtggatgggggcttgggaaacattgcttcccattattgtcatgctggagggccctttagcccatcctctcccccgccaccctccttattgaggcctggagcagacttcccagacctggtagtgcttcagggccctggtatgatggacctatatttgctgcttaagacatttgctcccactcaggttgtcccatcagccataaggcccccagggagcccgtgtgatggagcagagagagacctgagctctgcaatcttgggcaaggcttttcccttatgtttcttcttatctaaagtgaacagctggggctcatgtgctccctcctcatctaaagtgaacacatggggctcatgtgcagggtcctccccgctttcagagcctgaggtcccctgaggctcaggaaggctgctccaggtgagtgccgagctgacttcttggtggacgtgctgtggggacagcccattaaagaccacatcttggggccctgaaattgaaagttgtaactgcctggtgcatggtggccaggcctgctggaaacaggttggaagcgatctgtcacctttcactttgatttcctgagcagctcatgtggttgctcactgttgttctaccttgaatcttgaagattatttttcagaaattgataaagttattttaaaaagcacggggagagaaaaatatgcccattctcatctgttctgggccaggggacactgtattctggggtatccagtagggcccagagctgacctgcctccctgtccccaggctgactgtcgaagaacacatctggttctatgcccgcttgaaagggctctctgagaagcacgtgaaggcggagatggagcagatggccctggatgttggtttgccatcaagcaagctgaaaagcaaaacaagccagctgtcaggtgcggcccagagctaccttccctatccctctcccctcctcctccggctacacacatgcggaggaaaatcagcactgccccagggtcccaggctgggtgcggttggtaacagaaacttgtccctggctgtgcccctaggtcctctgccttcactcactgtctggggctggtcctggagtttgtcttgctctgtttttttgtaggtggaatgcagagaaagctatctgtggccttggcctttgtcgggggatctaaggttgtcattctggatgaacccacagctggtgtggacccttactcccgcaggggaatatgggagctgctgctgaaataccgacaaggtgcctgatgtgtatttattctgagtaaatggactgagagagagcggggggcttttgagaagtgtggctgtatctcatggctaggcttctgtgaagccatgggatactcttctgttatcacagaagagataaagggcattgagactgagattcctgagaggagatgctgtgtctttattcatctttttgtccccaacatggtgcactaaatttatggttagttgaaagggtggatgcttaaatgaatggaagcggagaggggcaggaagacgattgggctctctggttagagatctgatgtggtacagtatgaggagcacaggcaggcttggagccaactctggctggccctgagacattgggaaagtcacaacttgcctcaccttctttgccgataataatagtggtgcttacctcatagaggattaaattaaatgagaatgcacacaaaccacctagcacaatgcctggcatatagcaagttcccaaataaaatgctactgttcttacctctgtgaggatgtggtacctatatatacaaagctttgccattctaggggtcatagccatacagggtgaaaggtggcttccaggtctcttccagtgcttacccctgctaatatctctctagtccctgtcactgtgacaaatcagaactgagaggcctcacctgtcccacatccttgtgtttgtgcctggcaggccgcaccattattctctctacacaccacatggatgaagcggacgtcctgggggacaggattgccatcatctcccatgggaagctgtgctgtgtgggctcctccctgtttctgaagaaccagctgggaacaggctactacctgaccttggtcaagaaagatgtggaatcctccctcagttcctgcagaaacagtagtagcactgtgtcatacctgaaaaaggtgagctgcagtcttggtgctgggctggtgttgggtctgggcagccaggacttgctggctgtgaatgatttctccatctccaccccttttgccatgttgaaaccaccatctccctgctctgttgcccctttgaaatcatatcatacttaaggcatggaaagctaaggggccctctgctcccattgtgctagttctgttgaatcccgttttccttttcctatgaggcacagagagtgatggagaaggtccttagaggacattattatgtcaaagaaaagagacttgtcaagaggtaagagccttggctacaaatgacctggtgttcctgctcattacttttcaatctcattgaccttaacttttaaactataaaacagccaatatttattaggcactgatttcatgccagagacactctgggcatgaaagaaagtaatgataatagttaattttatatagcgttgttaccatttacaaccttttttttttttttaacctctatcatctcaattaaagtgcagagagaccctgggaagaaggtaactatatttattatcccagatgagggaagtgaggcttgtagggaattggtagctgattcaaggtcacccagcaggtaaataacagtggtgggaccagacccaattaccaggtatgttttcctctgtaccgcagtacatgcctga

SEQ ID NO: 721 - DNA, 4052 bp, Homo sapiens
gggttcccttaaacctttcatccagtttccccaatggtagcagcatgtgtaactgtagaatagtatcaaaaccatgaaattgacataggtacaattcacaaaccttcttcagatttcactagctttatgtgcgctcatttgtgtgtgtgtgtgcgtatttagttctatgcaattttatcatgtgtgaattcatgtaattactagctcagtcaagctgcagaaatatctcattgtcacaaagctccttcatgctaccccttaatggccacagccacctcccttcttcctcagttcctgacacctgtcaaccactaatgcgttcctcgtttttacagttttattatttctagaatgttacataaatggaaccatacagtaggtatccttttgatactggctttttttttttttcactcagcagtattcccttagatctatccaagttgtgtgtgtcaacagttcattcctcttcactgctgagtagtgttccctgggaggggtgtatcacagttccatggcatttttagatgtattttttaaacagctttcagcatcctctattttaattgttcatcaagtcctttttcccaatagactctgaatgctcctttatcatcgtattcccatcaccaacatcagtacccaaataggccctaaataaacatttatagcctcctgcctgcctgagaaaccagggtggacatggagagaaggcacttctgaaagttcaagcgcagtgccctgtgtccttacactccactcctcagtgctttctgtgggttcatttctgtcttctctcctgtcacagtctgcatggaggaggaacccacccacttgaagctgggcgtgtccattcagaacctggtaaaagtctaccgagatgggatgaaggtggctgtcgatggcctggcactgaatttttatgagggccagatcacctccttcctgggccacaatggagcggggaagacgaccaccatgtaagaagagggtgtggttcccgcagaatcagccacaggagggttctgcagtagagttagaaatttataccttaggaaaccatgctgatccctgggccaagggaaggagcacatgaggagttgccgaatgtgaacatgttatctaatcatgagtgtctttccacgtgctagtttgctagatgttatttcttcagcctaaaacaagctggggcctcagatgacctttcccatgtagttcacagaattctgcagtggtcttggaacctgcagccacgaaaagatagattacatatgttggagggagttggtaattcccaggaactctgtctctaagcagatgtgagaagcacctgtgagacgcaatcaagctgggcagctggcttgattgccttccctgcgacctcaaggaccttacagtgggtagtatcaggaggggtcaggggctgtaaagcaccagcgttagcctcagtggcttccagcacgattcctcaaccattctaaccattccaaagggtatatctttggggggtgacattcttttcctgttttctttttaatctttttttaaaacatagaattaatatattatgagcttttcagaagatttttaaaaggcagtcagaaatcctactacctaacacaaaaattgtttttatctttgaataatatgttcttgtttgtccattttccatgcatgcgatgttaggcatacaaaatacattttttaaagaatactttcattgcagattggaaacttcgtttaaaaaatgctcatactaaaattggcatttctaacccataggcccacttgtagttatttaccgaagcaaaaggacagctttgctttgtgtgggtctggtagggttcattagaaaggaatgggggcggtgggagggttggtgttctgttctctctgcagactgaatggagcatctagagttaagggtaggtcaaccctgacttctgtacttctaaatttttgtcctcaggtcaatcctgaccgggttgttccccccgacctcgggcaccgcctacatcctgggaaaagacattcgctctgagatgagcaccatccggcagaacctgggggtctgtccccagcataacgtgctgtttgacatgtgagtaccagcagcacgttaagaataggccttttctggatgtgtgtgtgtcatgccatcatgggaggagtgggacttaagcattttactttgctgtgtttttgttttttctttttttcttttttatttttttgagatggagtctcgctctgtagccaggctggactgtagtggcgcgatctcggctcactgcaaccttggcctcccaggttcaagcgattctcctgcctcagcctcccgagtagctgggactctaggcacacaccaccatgcccagctaatttttgtgtttttagtagagacggggtttcaccatgttggccaggatggtctcaatgtcttgacctcgtgatccgcccacctcggtctcccaaagtgctgggaacacaggcatgagccactgtgtctggccacattttactttctttgaatatggcaggctcacctccgtgaacaccttgagacctagttgttctttgattttaggagaagtgggaggtgaatggttgagctgtagaggtgacatcagcccagccagtggatgggggcttgggaaacattgcttcccattattgtcatgctggagggccctttagcccatcctctcccccgccaccctccttattgaggcctggagcagacttcccagacctggtagtgcttcagggccctggtatgatggacctatatttgctgcttaagacatttgctcccactcaggttgtcccatcagccataaggcccccagggagcccgtgtgatggagcagagagagacctgagctctgcaatcttgggcaaggcttttcccttatgtttcttcttatctaaagtgaacagctggggctcatgtgctccctcctcatctaaagtgaacacatggggctcatgtgcagggtcctccccgctttcagagcctgaggtcccctgaggctcaggaaggctgctccaggtgagtgccgagctgacttcttggtggacgtgctgtggggacagcccattaaagaccacatcttggggccctgaaattgaaagttgtaactgcctggtgcatggtggccaggcctgctggaaacaggttggaagcgatctgtcacctttcactttgatttcctgagcagctcatgtggttgctcactgttgttctaccttgaatcttgaagattatttttcagaaattgataaagttattttaaaaagcacggggagagaaaaatatgcccattctcatctgttctgggccaggggacactgtattctggggtatccagtagggcccagagctgacctgcctccctgtccccaggctgactgtcgaagaacacatctggttctatgcccgcttgaaagggctctctgagaagcacgtgaaggcggagatggagcagatggccctggatgttggtttgccatcaagcaagctgaaaagcaaaacaagccagctgtcaggtgcggcccagagctaccttccctatccctctcccctcctcctccggctacacacatgcggaggaaaatcagcactgccccagggtcccaggctgggtgcggttggtaacagaaacttgtccctggctgtgcccctaggtcctctgccttcactcactgtctggggctggtcctggagtttgtcttgctctgtttttttgtaggtggaatgcagagaaagctatctgtggccttggcctttgtcgggggatctaaggttgtcattctggatgaacccacagctggtgtggacccttactcccgcaggggaatatgggagctgctgctgaaataccgacaaggtgcctgatgtgtatttattctgagtaaatggactgagagagagcggggggcttttgagaagtgtggctgtatctcatggctaggcttctgtgaagccatgggatactcttctgttatcacagaagagataaagggcattgagactgagattcctgagagga

SEQ ID NO: 722 - DNA, 4046 bp, Homo sapiens
gctttcaggccagtacggaattcccaggccctggtattttccttgcaccaagtcctactggtttggcgaggaaagtgatgagaagagccaccctggttccaaccagaagagaatatcagaaagtaagtgctgttgacctcctgctctttctttaacctagtgctgctgcctctgctaactgttgggggcaagcgatgtctcctgcctttctaaaagactgtgaaaccactccaggggcagagaaatcacatgcagtgtccctttccaaatcctcccatgccatttatgtccaatgctgttgacctattgggagttcacggtctcgatccctgagggacattttctttgttgtcttggcttctagaagagtatcttttacttgccccctcccaaacacacatttcatggtctcctaacaagctagaagaaagaggtaaagacaagcgtgattgtggaaccatagcctcgctgcctgcctgtgacatggtgacctgtgtatcagcctgtgtgggctgagaccaagtggctaccacagagctcagcctatgcttcataatgtaatcattacccagatccctaatcctctcttggctcttaactgcagacagagatgtccacagctcatcaaaggctctgccttctgggttctttgtgcttagagtggcttcctaaatatttaataggtcccttttctgccagtctcttctgtgcccatcccctgattgcccttggtaaaagtatgatgccccttagtgtagcacgcttgcctgctgttcctaatcatcttctcctacctcctctttacacctagctcctgtttcagtcacctagaaatgctcacagtcgctggaatatgtcatgttcttccacacctccatgcctttgtaggtactgtttgctctcacaggagaactttctctctaacttgcctatcttctcaactcctcctttctctccaagatctagttccggatcccctcccctgagcatccctccttggttctcaggtagtcagtcactctctgccctgaacttccatggcacgtgaaagaaaatctttttattttaaaacaattacagactcacaagaagtaatacaaattacatgagggggttcccttaaacctttcatccagtttccccaatggtagcagcatgtgtaactgtagaatagtatcaaaaccatgaaattgacataggtacaattcacaaaccttcttcagatttcactagctttatgtgcgctcatttgtgtgtgtgtgtgcgtatttagttctatgcaattttatcatgtgtgaattcatgtaattactagctcagtcaagctgcagaaatatctcattgtcacaaagctccttcatgctaccccttaatggccacagccacctcccttcttcctcagttcctgacacctgtcaaccactaatgcgttcctcgtttttacagttttattatttctagaatgttacataaatggaaccatacagtaggtatccttttgatactggctttttttttttttcactcagcagtattcccttagatctatccaagttgtgtgtgtcaacagttcattcctcttcactgctgagtagtgttccctgggaggggtgtatcacagttccatggcatttttagatgtattttttaaacagctttcagcatcctctattttaattgttcatcaagtcctttttcccaatagactctgaatgctcctttatcatcgtattcccatcaccaacatcagtacccaaataggccctaaataaacatttatagcctcctgcctgcctgagaaaccagggtggacatggagagaaggcacttctgaaagttcaagcgcagtgccctgtgtccttacactccactcctcagtgctttctgtgggttcatttctgtcttctctcctgtcacagtctgcatggaggaggaacccacccacttgaagctgggcgtgtccattcagaacctggtaaaagtctaccgagatgggatgaaggtggctgtcgatggcctggcactgaatttttatgagggccagatcacctccttcctgggccacaatggagcggggaagacgaccaccatgtaagaagagggtgtggttcccgcagaatcagccacaggagggttctgcagtagagttagaaatttataccttaggaaaccatgctgatccctgggccaagggaaggagcacatgaggagttgccgaatgtgaacatgttatctaatcatgagtgtctttccacgtgctagtttgctagatgttatttcttcagcctaaaacaagctggggcctcagatgacctttcccatgtagttcacagaattctgcagtggtcttggaacctgcagccacgaaaagatagattacatatgttggagggagttggtaattcccaggaactctgtctctaagcagatgtgagaagcacctgtgagacgcaatcaagctgggcagctggcttgattgccttccctgcgacctcaaggaccttacagtgggtagtatcaggaggggtcaggggctgtaaagcaccagcgttagcctcagtggcttccagcacgattcctcaaccattctaaccattccaaagggtatatctttggggggtgacattcttttcctgttttctttttaatctttttttaaaacatagaattaatatattatgagcttttcagaagatttttaaaaggcagtcagaaatcctactacctaacacaaaaattgtttttatctttgaataatatgttcttgtttgtccattttccatgcatgcgatgttaggcatacaaaatacattttttaaagaatactttcattgcagattggaaacttcgtttaaaaaatgctcatactaaaattggcatttctaacccataggcccacttgtagttatttaccgaagcaaaaggacagctttgctttgtgtgggtctggtagggttcattagaaaggaatgggggcggtgggagggttggtgttctgttctctctgcagactgaatggagcatctagagttaagggtaggtcaaccctgacttctgtacttctaaatttttgtcctcaggtcaatcctgaccgggttgttccccccgacctcgggcaccgcctacatcctgggaaaagacattcgctctgagatgagcaccatccggcagaacctgggggtctgtccccagcataacgtgctgtttgacatgtgagtaccagcagcacgttaagaataggccttttctggatgtgtgtgtgtcatgccatcatgggaggagtgggacttaagcattttactttgctgtgtttttgttttttctttttttcttttttatttttttgagatggagtctcgctctgtagccaggctggactgtagtggcgcgatctcggctcactgcaaccttggcctcccaggttcaagcgattctcctgcctcagcctcccgagtagctgggactctaggcacacaccaccatgcccagctaatttttgtgtttttagtagagacggggtttcaccatgttggccaggatggtctcaatgtcttgacctcgtgatccgcccacctcggtctcccaaagtgctgggaacacaggcatgagccactgtgtctggccacattttactttctttgaatatggcaggctcacctccgtgaacaccttgagacctagttgttctttgattttaggagaagtgggaggtgaatggttgagctgtagaggtgacatcagcccagccagtggatgggggcttgggaaacattgcttcccattattgtcatgctggagggccctttagcccatcctctcccccgccaccctccttattgaggcctggagcagacttcccagacctggtagtgcttcagggccctggtatgatggacctatatttgctgcttaagacatttgctcccactcaggttgtcccatcagccataaggcccccagggagcccgtgtgatggagcagagagagacctgagctctgcaatcttgggcaaggcttttcccttatgtttcttcttatctaaagtg

SEQ ID NO: 723 - DNA, 4038 bp, Homo sapiens
tggtggtggtgggatgtgtgtgtgtgtgtgtgtgtgtgtgtgtgtgtgtgtgtagggatcaggatgcgggaggagctgggttctgcttgtattggttctctgttttgcattgaatagtgtgtttccttgtatggctatctatagcttttcaaggtcaccagaaattatcctgtttttcaccttctaaacaattagctggaatttttcaaaggaagacttttacaaagacccctaagctaaggtttactctagaaaggatgtcttaagacagggcacaggagttcagaggcattaagagctggtgcctgttgtcatgtagtgagtatgtgcctacatggtaaagctttgacgtgaacctcaagttcagggtccaaaatctgtgtgcctttttactttgcacatctgcattttctattctagcttggaatctgaaacattgacaagagctgcctgaaatgtatgtctgtggtgtgattagagttacgataagcaagtcaatagtgagatgaccttggagatgttgaacttttgtgagagaatgagttgtttttttgttttggtttttagtactttaacataatctacctttagtttaagtatcgctcacagttacctagttactgaagcaagcccccaaagaaatttggtttggcaacactttgttagcctcgtttttctctctacattgcattgctcgtgaagcattggatcatacgtacatttcagagtctagagggcctgtccttctgtggcccagatgtggtgctccctctagcatgcaggctcagaggccttggcccatcaccctggctcacgtgtgtctttctttctccccttgtccttccttggggcctccagctttctgcgggtgatgagccggtcaatgcccctcttcatgacgctggcctggatttactcagtggctgtgatcatcaagggcatcgtgtatgagaaggaggcacggctgaaagagaccatgcggatcatgggcctggacaacagcatcctctggtttagctggttcattagtagcctcattcctcttcttgtgagcgctggcctgctagtggtcatcctgaaggtaaggcagcctcactcgctcttccctgccaggaaactccgaaatagctcaacacgggctaagggaggagaagaagaaaaaaaatccaagcctctggtagagaaggggtcatacctgtcatttcctgcaatttcatccatttatagttggggaaagtgaggcccagagaggggcagtgacttgcccaaggtcaacccagccgggtagcagctaagtaggatgagagtgcagggttcatgctttccagataaccacatgctcaactgtgccatgctgtctcattggtagtggttcatggcagcatctgaaagctatttattttcttagatatattgggtggcgattcttcctaagtttctaagaacaataatcagaaggatatatattgttgcaggttagactgtctggaagcagaggctgaaatagagtttgatgtatgggtatttatgagggctcaatacctatggaagagatatggaagatgcaggattgggcagagggaggagttgaactgtgatatagggccaaccccgtggggcactctagagaatatgcagcttgttggagttgttcttcatcgagctgaaacatccagccctttgtgctcccccaaggcctccctcctgacaccacctacctcagccctctcaatcaatcactggatgtgggctgccctgggaaggtcgtgccccagggcctacatggctctctgctgctgtgacaaacccagagttgctgatgcctgaggccgtctactgacagctgggcaacaaggcttccctgaatggggactctgggcagtgcagttttgtgtctgaaccatacattaatatatttatatccgaattttctttctctgcaagcatttcatataaagacacatcaggtaaaaataaatgtttttgaagcaaaaggagtacaaagagataagaactaactaatttaatactagttaccatctgttacaaatagttcctactgattgccaaggactgtttaaacacatcacatgggcttcttcttctatcctcactaacccttttaacagacaaggaaatgaggctcaggaaggtcaaggactttattgaggttccacagtaggatacagttcttgctaaaagcaacccctccctcatgctctgttatctaactgcaaggggaaggtcagtggcagaggtagtggtcccatggttggtgcataagagctgctctgagacaactgcatgctggtgggtcctgcagacatgtacccatcagccggagataggctcaaaatatccacaagagtttggatgattgtgggaatgcagaatccatggtgatcaagagggaaagtcaagttgcctggccattttccttggcttttagacagaaaagttacgtgggatattatctcccacagctcttctgtggtgccaccagtcatagtccttatataaggagaaaccagttgaaattacctattgaagaaacaaagagcaaactcgcccactgaaatgcgtagaaagccctggactctgttgtattcataactctgccattatttttctgcgtagttttgggtaagtcacttatcttctttaggatggtaatgatcagttgcctcatcagaaagatgaacagcattacgcctctgcattgtctctaacatgagtaggaataaaccctgtcttttttctgtagatcatacaagtgagtgcttgggattgttgaggcagcacatttgatgtgtctcttccttcccagttaggaaacctgctgccctacagtgatcccagcgtggtgtttgtcttcctgtccgtgtttgctgtggtgacaatcctgcagtgcttcctgattagcacactcttctccagagccaacctggcagcagcctgtgggggcatcatctacttcacgctgtacctgccctacgtcctgtgtgtggcatggcaggactacgtgggcttcacactcaagatcttcgctgtgagtacctctggcctttcttcagtggctgtaggcatttgaccttcctttggagtccctgaataaaagcagcaagttgagaacagaagatgattgtcttttccaatgggacatgaaccttagctctagattctaagctctttaagggtaagggcaagcattgtgttttattaaattgtttacctttagtcttctcagtgaatcctggttgaattgaattgaatggaatttttccgagagccagactgcatcttgaactgggctggggataaatggcattgaggaatggcttcaggcaacagatgccatctctgccctttatctcccagctctgttggctatgttaagctcatgacaaagccaaggccacaaatagaactgaaaactcttgatgtcagagatgacctctcttgtcttccttgtgtccagtatggtgttttgcttgagtaatgttttctgaactaagcacaactgaggagcaggtgcctcatcccacaaattcctgacttggacacttccttccctcgtacagagcagggggatatcttggagagtgtgtgagcccctacaagtgcaagttgtcagatgtccccaggtcacttatcaggaaagctaagagtgactcataggatgctcctgttgcctcagtctgggcttcataggcatcagcagccccaaacaggcacctctgatcctgagccatccttggctgagcagggagcctcagaagactgtgggtatgcgcatgtgtgtgggggaacaggattgctgagccttggggcatctttggaaacataaagttttaaaagttttatgcttcactgtatatgcatttctgaaatgtttgtatataatgagtggttacaaatggaatcattttatatgttacttggtagcccaccactcccctaaagggactctataggtaaatactacttctgcaccttatgattgatccattttgcaaattcaaatttctccaggtataa

SEQ ID NO: 724 - DNA, 4045 bp, Homo sapiens
cacgcccggctgactttttgtattttagtagagacgaggtttcaccatgttacccaggctagacttcaactcctgagctcaggcaatccaccctccttggcctcccaaagtgctgggattacaggtgtgagccactgcacccagcccaccactttaattttttacactctacccttttggtcaaaatttgctcaatctgcaagcttaaaatgtgtcatgacaaacacatgcaagcacatactcacacatagatgcagaaacagcgtctaaacttataaaagcacagtttatgtaaatgtgtgcacttcttctccctaggtggtaaaccacatttcaaaacaacccaaataaaactgaacaaagcttcttcctcttagactttttagaaaatctttcagtgctgagtcactaagctgccaagttctcattgtgggaactatgcctttggatgtaatgatttcttctaagacaatgggcggaggtgtagttattgcagacatctgaaatatgtaatgtttcttccagattctggaaattctcttattctctgtggttggtggtggtggtgggatgtgtgtgtgtgtgtgtgtgtgtgtgtgtgtgtgtgtgtagggatcaggatgcgggaggagctgggttctgcttgtattggttctctgttttgcattgaatagtgtgtttccttgtatggctatctatagcttttcaaggtcaccagaaattatcctgtttttcaccttctaaacaattagctggaatttttcaaaggaagacttttacaaagacccctaagctaaggtttactctagaaaggatgtcttaagacagggcacaggagttcagaggcattaagagctggtgcctgttgtcatgtagtgagtatgtgcctacatggtaaagctttgacgtgaacctcaagttcagggtccaaaatctgtgtgcctttttactttgcacatctgcattttctattctagcttggaatctgaaacattgacaagagctgcctgaaatgtatgtctgtggtgtgattagagttacgataagcaagtcaatagtgagatgaccttggagatgttgaacttttgtgagagaatgagttgtttttttgttttggtttttagtactttaacataatctacctttagtttaagtatcgctcacagttacctagttactgaagcaagcccccaaagaaatttggtttggcaacactttgttagcctcgtttttctctctacattgcattgctcgtgaagcattggatcatacgtacatttcagagtctagagggcctgtccttctgtggcccagatgtggtgctccctctagcatgcaggctcagaggccttggcccatcaccctggctcacgtgtgtctttctttctccccttgtccttccttggggcctccagctttctgcgggtgatgagccggtcaatgcccctcttcatgacgctggcctggatttactcagtggctgtgatcatcaagggcatcgtgtatgagaaggaggcacggctgaaagagaccatgcggatcatgggcctggacaacagcatcctctggtttagctggttcattagtagcctcattcctcttcttgtgagcgctggcctgctagtggtcatcctgaaggtaaggcagcctcactcgctcttccctgccaggaaactccgaaatagctcaacacgggctaagggaggagaagaagaaaaaaaatccaagcctctggtagagaaggggtcatacctgtcatttcctgcaatttcatccatttatagttggggaaagtgaggcccagagaggggcagtgacttgcccaaggtcaacccagccgggtagcagctaagtaggatgagagtgcagggttcatgctttccagataaccacatgctcaactgtgccatgctgtctcattggtagtggttcatggcagcatctgaaagctatttattttcttagatatattgggtggcgattcttcctaagtttctaagaacaataatcagaaggatatatattgttgcaggttagactgtctggaagcagaggctgaaatagagtttgatgtatgggtatttatgagggctcaatacctatggaagagatatggaagatgcaggattgggcagagggaggagttgaactgtgatatagggccaaccccgtggggcactctagagaatatgcagcttgttggagttgttcttcatcgagctgaaacatccagccctttgtgctcccccaaggcctccctcctgacaccacctacctcagccctctcaatcaatcactggatgtgggctgccctgggaaggtcgtgccccagggcctacatggctctctgctgctgtgacaaacccagagttgctgatgcctgaggccgtctactgacagctgggcaacaaggcttccctgaatggggactctgggcagtgcagttttgtgtctgaaccatacattaatatatttatatccgaattttctttctctgcaagcatttcatataaagacacatcaggtaaaaataaatgtttttgaagcaaaaggagtacaaagagataagaactaactaatttaatactagttaccatctgttacaaatagttcctactgattgccaaggactgtttaaacacatcacatgggcttcttcttctatcctcactaacccttttaacagacaaggaaatgaggctcaggaaggtcaaggactttattgaggttccacagtaggatacagttcttgctaaaagcaacccctccctcatgctctgttatctaactgcaaggggaaggtcagtggcagaggtagtggtcccatggttggtgcataagagctgctctgagacaactgcatgctggtgggtcctgcagacatgtacccatcagccggagataggctcaaaatatccacaagagtttggatgattgtgggaatgcagaatccatggtgatcaagagggaaagtcaagttgcctggccattttccttggcttttagacagaaaagttacgtgggatattatctcccacagctcttctgtggtgccaccagtcatagtccttatataaggagaaaccagttgaaattacctattgaagaaacaaagagcaaactcgcccactgaaatgcgtagaaagccctggactctgttgtattcataactctgccattatttttctgcgtagttttgggtaagtcacttatcttctttaggatggtaatgatcagttgcctcatcagaaagatgaacagcattacgcctctgcattgtctctaacatgagtaggaataaaccctgtcttttttctgtagatcatacaagtgagtgcttgggattgttgaggcagcacatttgatgtgtctcttccttcccagttaggaaacctgctgccctacagtgatcccagcgtggtgtttgtcttcctgtccgtgtttgctgtggtgacaatcctgcagtgcttcctgattagcacactcttctccagagccaacctggcagcagcctgtgggggcatcatctacttcacgctgtacctgccctacgtcctgtgtgtggcatggcaggactacgtgggcttcacactcaagatcttcgctgtgagtacctctggcctttcttcagtggctgtaggcatttgaccttcctttggagtccctgaataaaagcagcaagttgagaacagaagatgattgtcttttccaatgggacatgaaccttagctctagattctaagctctttaagggtaagggcaagcattgtgttttattaaattgtttacctttagtcttctcagtgaatcctggttgaattgaattgaatggaatttttccgagagccagactgcatcttgaactgggctggggataaatggcattgaggaatggcttcaggcaacagatgccatctctgccctttatctcccagctctgttggctatgttaagctcatgacaaagccaaggccacaaatagaactgaaaactcttgatgtcagagatgacctctcttgtcttccttgtgtccagtatggtgttt

SEQ ID NO: 725 - DNA, 4050 bp, Homo sapiens
ttggttttaggtactgggaccctggtcctcgagctgacccctttgaggacatgcggtacgtctgggggggcttcgcctacttgcaggatgtggtggagcaggcaatcatcagggtgctgacgggcaccgagaagaaaactggtgtctatatgcaacagatgccctatccctgttacgttgatgacatgtaagttacctgcaagccactgtttttaaccagtttatactgtgccagatgggggtgtatatatgtgtgtgcatgtgcatgcatgtgtgaatgatctggaaataagatgccagatgtaagttgtcaacagttgcagccacatgacagacatagatatatgtgcacacactagtaaacctctttccttctcatccatggttgccacttttatctttttatttttatttttttttttgagatggagtctcgctctgacgcccaggctggagtgcagtggctcgatctcggctcactgcaacctttgcctcccgggttcaagctattctcctgcctcagcctccacagtagctgggactacaggctcatgctgccacgcccggctgactttttgtattttagtagagacgaggtttcaccatgttacccaggctagacttcaactcctgagctcaggcaatccaccctccttggcctcccaaagtgctgggattacaggtgtgagccactgcacccagcccaccactttaattttttacactctacccttttggtcaaaatttgctcaatctgcaagcttaaaatgtgtcatgacaaacacatgcaagcacatactcacacatagatgcagaaacagcgtctaaacttataaaagcacagtttatgtaaatgtgtgcacttcttctccctaggtggtaaaccacatttcaaaacaacccaaataaaactgaacaaagcttcttcctcttagactttttagaaaatctttcagtgctgagtcactaagctgccaagttctcattgtgggaactatgcctttggatgtaatgatttcttctaagacaatgggcggaggtgtagttattgcagacatctgaaatatgtaatgtttcttccagattctggaaattctcttattctctgtggttggtggtggtggtgggatgtgtgtgtgtgtgtgtgtgtgtgtgtgtgtgtgtgtgtagggatcaggatgcgggaggagctgggttctgcttgtattggttctctgttttgcattgaatagtgtgtttccttgtatggctatctatagcttttcaaggtcaccagaaattatcctgtttttcaccttctaaacaattagctggaatttttcaaaggaagacttttacaaagacccctaagctaaggtttactctagaaaggatgtcttaagacagggcacaggagttcagaggcattaagagctggtgcctgttgtcatgtagtgagtatgtgcctacatggtaaagctttgacgtgaacctcaagttcagggtccaaaatctgtgtgcctttttactttgcacatctgcattttctattctagcttggaatctgaaacattgacaagagctgcctgaaatgtatgtctgtggtgtgattagagttacgataagcaagtcaatagtgagatgaccttggagatgttgaacttttgtgagagaatgagttgtttttttgttttggtttttagtactttaacataatctacctttagtttaagtatcgctcacagttacctagttactgaagcaagcccccaaagaaatttggtttggcaacactttgttagcctcgtttttctctctacattgcattgctcgtgaagcattggatcatacgtacatttcagagtctagagggcctgtccttctgtggcccagatgtggtgctccctctagcatgcaggctcagaggccttggcccatcaccctggctcacgtgtgtctttctttctccccttgtccttccttggggcctccagctttctgcgggtgatgagccggtcaatgcccctcttcatgacgctggcctggatttactcagtggctgtgatcatcaagggcatcgtgtatgagaaggaggcacggctgaaagagaccatgcggatcatgggcctggacaacagcatcctctggtttagctggttcattagtagcctcattcctcttcttgtgagcgctggcctgctagtggtcatcctgaaggtaaggcagcctcactcgctcttccctgccaggaaactccgaaatagctcaacacgggctaagggaggagaagaagaaaaaaaatccaagcctctggtagagaaggggtcatacctgtcatttcctgcaatttcatccatttatagttggggaaagtgaggcccagagaggggcagtgacttgcccaaggtcaacccagccgggtagcagctaagtaggatgagagtgcagggttcatgctttccagataaccacatgctcaactgtgccatgctgtctcattggtagtggttcatggcagcatctgaaagctatttattttcttagatatattgggtggcgattcttcctaagtttctaagaacaataatcagaaggatatatattgttgcaggttagactgtctggaagcagaggctgaaatagagtttgatgtatgggtatttatgagggctcaatacctatggaagagatatggaagatgcaggattgggcagagggaggagttgaactgtgatatagggccaaccccgtggggcactctagagaatatgcagcttgttggagttgttcttcatcgagctgaaacatccagccctttgtgctcccccaaggcctccctcctgacaccacctacctcagccctctcaatcaatcactggatgtgggctgccctgggaaggtcgtgccccagggcctacatggctctctgctgctgtgacaaacccagagttgctgatgcctgaggccgtctactgacagctgggcaacaaggcttccctgaatggggactctgggcagtgcagttttgtgtctgaaccatacattaatatatttatatccgaattttctttctctgcaagcatttcatataaagacacatcaggtaaaaataaatgtttttgaagcaaaaggagtacaaagagataagaactaactaatttaatactagttaccatctgttacaaatagttcctactgattgccaaggactgtttaaacacatcacatgggcttcttcttctatcctcactaacccttttaacagacaaggaaatgaggctcaggaaggtcaaggactttattgaggttccacagtaggatacagttcttgctaaaagcaacccctccctcatgctctgttatctaactgcaaggggaaggtcagtggcagaggtagtggtcccatggttggtgcataagagctgctctgagacaactgcatgctggtgggtcctgcagacatgtacccatcagccggagataggctcaaaatatccacaagagtttggatgattgtgggaatgcagaatccatggtgatcaagagggaaagtcaagttgcctggccattttccttggcttttagacagaaaagttacgtgggatattatctcccacagctcttctgtggtgccaccagtcatagtccttatataaggagaaaccagttgaaattacctattgaagaaacaaagagcaaactcgcccactgaaatgcgtagaaagccctggactctgttgtattcataactctgccattatttttctgcgtagttttgggtaagtcacttatcttctttaggatggtaatgatcagttgcctcatcagaaagatgaacagcattacgcctctgcattgtctctaacatgagtaggaataaaccctgtcttttttctgtagatcatacaagtgagtgcttgggattgttgaggcagcacatttgatgtgtctcttccttcccagttaggaaacctgctgccctacagtgatcccagcgtggtgtttgtcttcctgtccgtgtttgctgtggtgacaatcctgcagtgcttcctgattagcacactcttctcc

SEQ ID NO: 726 - DNA, 4042 bp, Homo sapiens
agactggtctgactttgagtctcagctccacatctagtaatactatgaccaagccctggttaaaatcatgtttttttttcttcagcctcagtcttctcacatataaaatagggacactgtcatttacctcagttttctgtgaggataaaacaacgacagtgtatatgcaagtattttgtaaattttgtagtgctcctcaagatttagttggtgtttactacttgtactttctcactggaatggcagatgctgttggacagcagggacaatgaccacttttgggaacagcagttggatggcttagattggacagcccaagacatcgtggcgtttttggccaagcacccagaggatgtccagtccagtaatggttctgtgtacacctggagagaagctttcaacgagactaaccaggcaatccggaccatatctcgcttcatggaggtgaatctgttgctgggatcatttagaaaagacttaacggcttctttctctgagacgttacaataaggttcaggcaggaggcaagtttagaaataatgtatagtctcatttacaaaactatccctcaagcctaacacaggatttgataacaaaaggcacttaataaatgttagttgagtggttgaatgagtaaataaactctagctttagtaaattaactctagcttattctatataggctcaagagaatatttctacccattttcttctaggttttcctatctcagtgactaatggtagcaaagcattcccttaaaaaggcattatttgtgaaacttatctaaaatcgaattcgggtccaattaaatttttgaaattttatattaaaaattatattagtagggatgggtaagaggtgttttggtctggttggttggttagttgctatgactcagaattgctaagaaaacagaaaagtaagataagatcattgttttaacctcttttcctccacaaaatcaataaataacatatccctaaattactcttagaatttctcttaaattgcagtgaaaaaccaaaatccttcattcttggttgaaggttggaaaactacgttagagaggattagagagagaggatgagcaatcgtgtagtcagcccttgcctcctagtgtaggatttgtctcagccactgcttgttgtcctggctgccaacgttctcatgaaggctgttcttctatcagtgtgtcaacctgaacaagctagaacccatagcaacagaagtctggctcatcaacaagtccatggagctgctggatgagaggaagttctgggctggtattgtgttcactggaattactccaggcagcattgagctgccccatcatgtcaagtacaagatccgaatggacattgacaatgtggagaggacaaataaaatcaaggatgggtaagtggaatcccatcacaccagcctggtcttggggaggtccagagcacctattatattaggacaagaggtactttattttaactaaaaatttggtagaaatttcaacaacaacaaaaaaactcaacttggtgtcatgattttggtgaaattggtacatgacttgctggaaggtttttcataggtcataaaataacagtatcttttgatttagcatttctactcaagggaattaattccaggaattttggtggcaggcacctgtaatcccagctactcgggaggctgaggcaggagaattgcttgaacccaggaggcagaggttgcagtgagctaagatcgcatcattgcactcccgcctgggcaataagagtgaaactccatctcaaaaaaaaaaaaagatacaaaaatagaaaaaggggcttggtaagggtagtagggttttgggcaatttttttttttttttttttttattgtatggttctaaaggaatggttgattacctgtggtttggttttaggtactgggaccctggtcctcgagctgacccctttgaggacatgcggtacgtctgggggggcttcgcctacttgcaggatgtggtggagcaggcaatcatcagggtgctgacgggcaccgagaagaaaactggtgtctatatgcaacagatgccctatccctgttacgttgatgacatgtaagttacctgcaagccactgtttttaaccagtttatactgtgccagatgggggtgtatatatgtgtgtgcatgtgcatgcatgtgtgaatgatctggaaataagatgccagatgtaagttgtcaacagttgcagccacatgacagacatagatatatgtgcacacactagtaaacctctttccttctcatccatggttgccacttttatctttttatttttatttttttttttgagatggagtctcgctctgacgcccaggctggagtgcagtggctcgatctcggctcactgcaacctttgcctcccgggttcaagctattctcctgcctcagcctccacagtagctgggactacaggctcatgctgccacgcccggctgactttttgtattttagtagagacgaggtttcaccatgttacccaggctagacttcaactcctgagctcaggcaatccaccctccttggcctcccaaagtgctgggattacaggtgtgagccactgcacccagcccaccactttaattttttacactctacccttttggtcaaaatttgctcaatctgcaagcttaaaatgtgtcatgacaaacacatgcaagcacatactcacacatagatgcagaaacagcgtctaaacttataaaagcacagtttatgtaaatgtgtgcacttcttctccctaggtggtaaaccacatttcaaaacaacccaaataaaactgaacaaagcttcttcctcttagactttttagaaaatctttcagtgctgagtcactaagctgccaagttctcattgtgggaactatgcctttggatgtaatgatttcttctaagacaatgggcggaggtgtagttattgcagacatctgaaatatgtaatgtttcttccagattctggaaattctcttattctctgtggttggtggtggtggtgggatgtgtgtgtgtgtgtgtgtgtgtgtgtgtgtgtgtgtgtagggatcaggatgcgggaggagctgggttctgcttgtattggttctctgttttgcattgaatagtgtgtttccttgtatggctatctatagcttttcaaggtcaccagaaattatcctgtttttcaccttctaaacaattagctggaatttttcaaaggaagacttttacaaagacccctaagctaaggtttactctagaaaggatgtcttaagacagggcacaggagttcagaggcattaagagctggtgcctgttgtcatgtagtgagtatgtgcctacatggtaaagctttgacgtgaacctcaagttcagggtccaaaatctgtgtgcctttttactttgcacatctgcattttctattctagcttggaatctgaaacattgacaagagctgcctgaaatgtatgtctgtggtgtgattagagttacgataagcaagtcaatagtgagatgaccttggagatgttgaacttttgtgagagaatgagttgtttttttgttttggtttttagtactttaacataatctacctttagtttaagtatcgctcacagttacctagttactgaagcaagcccccaaagaaatttggtttggcaacactttgttagcctcgtttttctctctacattgcattgctcgtgaagcattggatcatacgtacatttcagagtctagagggcctgtccttctgtggcccagatgtggtgctccctctagcatgcaggctcagaggccttggcccatcaccctggctcacgtgtgtctttctttctccccttgtccttccttggggcctccagctttctgcgggtgatgagccggtcaatgcccctcttcatgacgctggcctggatttactcagtggctgtgatcatcaagggcatcgtgtatgagaaggaggcacggctgaaagagaccatgcggatcatgggcctggacaacagcatcctctggtttagctgg

SEQ ID NO: 727 - DNA, 4037 bp, Homo sapiens
atggagttgtgtaaggtgaagcatatacactattcaacatagtaactatataaaggaagtattgttgttgttactgtagttaataccattaagtgagatgtttcgtatagtggaaagcacatggactctgaattcagactggtctgactttgagtctcagctccacatctagtaatactatgaccaagccctggttaaaatcatgtttttttttcttcagcctcagtcttctcacatataaaatagggacactgtcatttacctcagttttctgtgaggataaaacaacgacagtgtatatgcaagtattttgtaaattttgtagtgctcctcaagatttagttggtgtttactacttgtactttctcactggaatggcagatgctgttggacagcagggacaatgaccacttttgggaacagcagttggatggcttagattggacagcccaagacatcgtggcgtttttggccaagcacccagaggatgtccagtccagtaatggttctgtgtacacctggagagaagctttcaacgagactaaccaggcaatccggaccatatctcgcttcatggaggtgaatctgttgctgggatcatttagaaaagacttaacggcttctttctctgagacgttacaataaggttcaggcaggaggcaagtttagaaataatgtatagtctcatttacaaaactatccctcaagcctaacacaggatttgataacaaaaggcacttaataaatgttagttgagtggttgaatgagtaaataaactctagctttagtaaattaactctagcttattctatataggctcaagagaatatttctacccattttcttctaggttttcctatctcagtgactaatggtagcaaagcattcccttaaaaaggcattatttgtgaaacttatctaaaatcgaattcgggtccaattaaatttttgaaattttatattaaaaattatattagtagggatgggtaagaggtgttttggtctggttggttggttagttgctatgactcagaattgctaagaaaacagaaaagtaagataagatcattgttttaacctcttttcctccacaaaatcaataaataacatatccctaaattactcttagaatttctcttaaattgcagtgaaaaaccaaaatccttcattcttggttgaaggttggaaaactacgttagagaggattagagagagaggatgagcaatcgtgtagtcagcccttgcctcctagtgtaggatttgtctcagccactgcttgttgtcctggctgccaacgttctcatgaaggctgttcttctatcagtgtgtcaacctgaacaagctagaacccatagcaacagaagtctggctcatcaacaagtccatggagctgctggatgagaggaagttctgggctggtattgtgttcactggaattactccaggcagcattgagctgccccatcatgtcaagtacaagatccgaatggacattgacaatgtggagaggacaaataaaatcaaggatgggtaagtggaatcccatcacaccagcctggtcttggggaggtccagagcacctattatattaggacaagaggtactttattttaactaaaaatttggtagaaatttcaacaacaacaaaaaaactcaacttggtgtcatgattttggtgaaattggtacatgacttgctggaaggtttttcataggtcataaaataacagtatcttttgatttagcatttctactcaagggaattaattccaggaattttggtggcaggcacctgtaatcccagctactcgggaggctgaggcaggagaattgcttgaacccaggaggcagaggttgcagtgagctaagatcgcatcattgcactcccgcctgggcaataagagtgaaactccatctcaaaaaaaaaaaaagatacaaaaatagaaaaaggggcttggtaagggtagtagggttttgggcaatttttttttttttttttttttattgtatggttctaaaggaatggttgattacctgtggtttggttttaggtactgggaccctggtcctcgagctgacccctttgaggacatgcggtacgtctgggggggcttcgcctacttgcaggatgtggtggagcaggcaatcatcagggtgctgacgggcaccgagaagaaaactggtgtctatatgcaacagatgccctatccctgttacgttgatgacatgtaagttacctgcaagccactgtttttaaccagtttatactgtgccagatgggggtgtatatatgtgtgtgcatgtgcatgcatgtgtgaatgatctggaaataagatgccagatgtaagttgtcaacagttgcagccacatgacagacatagatatatgtgcacacactagtaaacctctttccttctcatccatggttgccacttttatctttttatttttatttttttttttgagatggagtctcgctctgacgcccaggctggagtgcagtggctcgatctcggctcactgcaacctttgcctcccgggttcaagctattctcctgcctcagcctccacagtagctgggactacaggctcatgctgccacgcccggctgactttttgtattttagtagagacgaggtttcaccatgttacccaggctagacttcaactcctgagctcaggcaatccaccctccttggcctcccaaagtgctgggattacaggtgtgagccactgcacccagcccaccactttaattttttacactctacccttttggtcaaaatttgctcaatctgcaagcttaaaatgtgtcatgacaaacacatgcaagcacatactcacacatagatgcagaaacagcgtctaaacttataaaagcacagtttatgtaaatgtgtgcacttcttctccctaggtggtaaaccacatttcaaaacaacccaaataaaactgaacaaagcttcttcctcttagactttttagaaaatctttcagtgctgagtcactaagctgccaagttctcattgtgggaactatgcctttggatgtaatgatttcttctaagacaatgggcggaggtgtagttattgcagacatctgaaatatgtaatgtttcttccagattctggaaattctcttattctctgtggttggtggtggtggtgggatgtgtgtgtgtgtgtgtgtgtgtgtgtgtgtgtgtgtgtagggatcaggatgcgggaggagctgggttctgcttgtattggttctctgttttgcattgaatagtgtgtttccttgtatggctatctatagcttttcaaggtcaccagaaattatcctgtttttcaccttctaaacaattagctggaatttttcaaaggaagacttttacaaagacccctaagctaaggtttactctagaaaggatgtcttaagacagggcacaggagttcagaggcattaagagctggtgcctgttgtcatgtagtgagtatgtgcctacatggtaaagctttgacgtgaacctcaagttcagggtccaaaatctgtgtgcctttttactttgcacatctgcattttctattctagcttggaatctgaaacattgacaagagctgcctgaaatgtatgtctgtggtgtgattagagttacgataagcaagtcaatagtgagatgaccttggagatgttgaacttttgtgagagaatgagttgtttttttgttttggtttttagtactttaacataatctacctttagtttaagtatcgctcacagttacctagttactgaagcaagcccccaaagaaatttggtttggcaacactttgttagcctcgtttttctctctacattgcattgctcgtgaagcattggatcatacgtacatttcagagtctagagggcctgtccttctgtggcccagatgtggtgctccctctagcatgcaggctcagaggccttggcccatcaccctggctcacgtgtgtctttctttctccccttgtccttccttggggcctccagctttctgcgggtgatgagccggt

SEQ ID NO: 728 - DNA, 4045 bp, Homo sapiens
ttaggttttatgtgggatcaacagactgggtctcaaaagaggaaggtgatagaacacagtggggagggggaggtgcactagaaacagagggcctatgctttcattctggctttgctacttaatagctgtgtgacccaatcttagagacttaacctctctgaacttccattttctcatgtataaaatgggaaatattaaaggatactcactgggctggtggcttgtgcctgtaatcccagcacttggggaggttgaggtgggaggatcacttgagcccaggtgttcaagaccagcccaggcaacatggcaagactctgtctctatgaaaaaattaaaaattagccaggtgtggtggtgtgcacctgtagtcttagctacttggtaggctgagatgggaggatcacttgggcttgggaggtcaaggctgcggtgagctgtgattccatcactgcactccagcccgggcggcagagcgagacactgaatccaaacgacaacaacaacaaaaggcaaaaaaataaaagtgccctctttatggagttgtgtaaggtgaagcatatacactattcaacatagtaactatataaaggaagtattgttgttgttactgtagttaataccattaagtgagatgtttcgtatagtggaaagcacatggactctgaattcagactggtctgactttgagtctcagctccacatctagtaatactatgaccaagccctggttaaaatcatgtttttttttcttcagcctcagtcttctcacatataaaatagggacactgtcatttacctcagttttctgtgaggataaaacaacgacagtgtatatgcaagtattttgtaaattttgtagtgctcctcaagatttagttggtgtttactacttgtactttctcactggaatggcagatgctgttggacagcagggacaatgaccacttttgggaacagcagttggatggcttagattggacagcccaagacatcgtggcgtttttggccaagcacccagaggatgtccagtccagtaatggttctgtgtacacctggagagaagctttcaacgagactaaccaggcaatccggaccatatctcgcttcatggaggtgaatctgttgctgggatcatttagaaaagacttaacggcttctttctctgagacgttacaataaggttcaggcaggaggcaagtttagaaataatgtatagtctcatttacaaaactatccctcaagcctaacacaggatttgataacaaaaggcacttaataaatgttagttgagtggttgaatgagtaaataaactctagctttagtaaattaactctagcttattctatataggctcaagagaatatttctacccattttcttctaggttttcctatctcagtgactaatggtagcaaagcattcccttaaaaaggcattatttgtgaaacttatctaaaatcgaattcgggtccaattaaatttttgaaattttatattaaaaattatattagtagggatgggtaagaggtgttttggtctggttggttggttagttgctatgactcagaattgctaagaaaacagaaaagtaagataagatcattgttttaacctcttttcctccacaaaatcaataaataacatatccctaaattactcttagaatttctcttaaattgcagtgaaaaaccaaaatccttcattcttggttgaaggttggaaaactacgttagagaggattagagagagaggatgagcaatcgtgtagtcagcccttgcctcctagtgtaggatttgtctcagccactgcttgttgtcctggctgccaacgttctcatgaaggctgttcttctatcagtgtgtcaacctgaacaagctagaacccatagcaacagaagtctggctcatcaacaagtccatggagctgctggatgagaggaagttctgggctggtattgtgttcactggaattactccaggcagcattgagctgccccatcatgtcaagtacaagatccgaatggacattgacaatgtggagaggacaaataaaatcaaggatgggtaagtggaatcccatcacaccagcctggtcttggggaggtccagagcacctattatattaggacaagaggtactttattttaactaaaaatttggtagaaatttcaacaacaacaaaaaaactcaacttggtgtcatgattttggtgaaattggtacatgacttgctggaaggtttttcataggtcataaaataacagtatcttttgatttagcatttctactcaagggaattaattccaggaattttggtggcaggcacctgtaatcccagctactcgggaggctgaggcaggagaattgcttgaacccaggaggcagaggttgcagtgagctaagatcgcatcattgcactcccgcctgggcaataagagtgaaactccatctcaaaaaaaaaaaaagatacaaaaatagaaaaaggggcttggtaagggtagtagggttttgggcaatttttttttttttttttttttattgtatggttctaaaggaatggttgattacctgtggtttggttttaggtactgggaccctggtcctcgagctgacccctttgaggacatgcggtacgtctgggggggcttcgcctacttgcaggatgtggtggagcaggcaatcatcagggtgctgacgggcaccgagaagaaaactggtgtctatatgcaacagatgccctatccctgttacgttgatgacatgtaagttacctgcaagccactgtttttaaccagtttatactgtgccagatgggggtgtatatatgtgtgtgcatgtgcatgcatgtgtgaatgatctggaaataagatgccagatgtaagttgtcaacagttgcagccacatgacagacatagatatatgtgcacacactagtaaacctctttccttctcatccatggttgccacttttatctttttatttttatttttttttttgagatggagtctcgctctgacgcccaggctggagtgcagtggctcgatctcggctcactgcaacctttgcctcccgggttcaagctattctcctgcctcagcctccacagtagctgggactacaggctcatgctgccacgcccggctgactttttgtattttagtagagacgaggtttcaccatgttacccaggctagacttcaactcctgagctcaggcaatccaccctccttggcctcccaaagtgctgggattacaggtgtgagccactgcacccagcccaccactttaattttttacactctacccttttggtcaaaatttgctcaatctgcaagcttaaaatgtgtcatgacaaacacatgcaagcacatactcacacatagatgcagaaacagcgtctaaacttataaaagcacagtttatgtaaatgtgtgcacttcttctccctaggtggtaaaccacatttcaaaacaacccaaataaaactgaacaaagcttcttcctcttagactttttagaaaatctttcagtgctgagtcactaagctgccaagttctcattgtgggaactatgcctttggatgtaatgatttcttctaagacaatgggcggaggtgtagttattgcagacatctgaaatatgtaatgtttcttccagattctggaaattctcttattctctgtggttggtggtggtggtgggatgtgtgtgtgtgtgtgtgtgtgtgtgtgtgtgtgtgtgtagggatcaggatgcgggaggagctgggttctgcttgtattggttctctgttttgcattgaatagtgtgtttccttgtatggctatctatagcttttcaaggtcaccagaaattatcctgtttttcaccttctaaacaattagctggaatttttcaaaggaagacttttacaaagacccctaagctaaggtttactctagaaaggatgtcttaagacagggcacaggagttcagaggcattaagagctggtgcctgttgtcatgtagtgagtatgtgcctacatggtaaagctttgacgtgaa

SEQ ID NO: 729 - DNA, 4070 bp, Homo sapiens
cttggaaccctctgacactgatttgctctcttttctgagctgcttttagccacccatcctcgggacctgttttctctctgcctccacccctgcgggcagtcttaggtctcctgcccctcacgagcaccccagagaggccacgtgctcagtgatctcagtgggcgcatctttctagtcttgctattctttttggccatgttgttcagaaaccatactgggcagggccgacttcaccctaaaggctgcgtctcttcactctgcttttgtttgttccaaataaagtggcttcagaattgctaaccctagcctctgtgaacttgtgaggtacaattttgtgtctgttatgttaacaaaaatacatacataccttcctggtgatggtataaattgctattctctattggaaagcaatttggaatgaaaatttaaagaaccattttaaaatatgctatcctgcgtacctccattccacccacccccagggatgtagcctactgaaataattttaaagaagtcaccatatgagagaaaatgttattgctatattgttattgtgagaaattggaaatagactaaatgttcagcactataggaataattaatgaaattacatatactctatacaatcattatgctgccattgaaataataaatacaaaggcgcaaggggggaaaagcttataatgttagtgaaactaagactgatttttttataaagcagcagttttcagacccttggagactccaattcggtagaaccagagcttcatcttctctgtcgaagctgtgacaggagttgcaaatgcctctcctttttgctgagtttgcagctgctgtttttccggcagcacatctgtgcaggcctctgcctcggcccctctggatctgctgattgagcagcggattgatctgtccttctctttcgtgttgacccatgtgaggaaccaactggcaagggaacaagaaatggaaataggcctcctttgcatcatgacctgtacatcctgcaattggaaaagattgtactttagttggtttaaccagcagcattatttttctaaactaagcagtaagaaggaattaggttttatgtgggatcaacagactgggtctcaaaagaggaaggtgatagaacacagtggggagggggaggtgcactagaaacagagggcctatgctttcattctggctttgctacttaatagctgtgtgacccaatcttagagacttaacctctctgaacttccattttctcatgtataaaatgggaaatattaaaggatactcactgggctggtggcttgtgcctgtaatcccagcacttggggaggttgaggtgggaggatcacttgagcccaggtgttcaagaccagcccaggcaacatggcaagactctgtctctatgaaaaaattaaaaattagccaggtgtggtggtgtgcacctgtagtcttagctacttggtaggctgagatgggaggatcacttgggcttgggaggtcaaggctgcggtgagctgtgattccatcactgcactccagcccgggcggcagagcgagacactgaatccaaacgacaacaacaacaaaaggcaaaaaaataaaagtgccctctttatggagttgtgtaaggtgaagcatatacactattcaacatagtaactatataaaggaagtattgttgttgttactgtagttaataccattaagtgagatgtttcgtatagtggaaagcacatggactctgaattcagactggtctgactttgagtctcagctccacatctagtaatactatgaccaagccctggttaaaatcatgtttttttttcttcagcctcagtcttctcacatataaaatagggacactgtcatttacctcagttttctgtgaggataaaacaacgacagtgtatatgcaagtattttgtaaattttgtagtgctcctcaagatttagttggtgtttactacttgtactttctcactggaatggcagatgctgttggacagcagggacaatgaccacttttgggaacagcagttggatggcttagattggacagcccaagacatcgtggcgtttttggccaagcacccagaggatgtccagtccagtaatggttctgtgtacacctggagagaagctttcaacgagactaaccaggcaatccggaccatatctcgcttcatggaggtgaatctgttgctgggatcatttagaaaagacttaacggcttctttctctgagacgttacaataaggttcaggcaggaggcaagtttagaaataatgtatagtctcatttacaaaactatccctcaagcctaacacaggatttgataacaaaaggcacttaataaatgttagttgagtggttgaatgagtaaataaactctagctttagtaaattaactctagcttattctatataggctcaagagaatatttctacccattttcttctaggttttcctatctcagtgactaatggtagcaaagcattcccttaaaaaggcattatttgtgaaacttatctaaaatcgaattcgggtccaattaaatttttgaaattttatattaaaaattatattagtagggatgggtaagaggtgttttggtctggttggttggttagttgctatgactcagaattgctaagaaaacagaaaagtaagataagatcattgttttaacctcttttcctccacaaaatcaataaataacatatccctaaattactcttagaatttctcttaaattgcagtgaaaaaccaaaatccttcattcttggttgaaggttggaaaactacgttagagaggattagagagagaggatgagcaatcgtgtagtcagcccttgcctcctagtgtaggatttgtctcagccactgcttgttgtcctggctgccaacgttctcatgaaggctgttcttctatcagtgtgtcaacctgaacaagctagaacccatagcaacagaagtctggctcatcaacaagtccatggagctgctggatgagaggaagttctgggctggtattgtgttcactggaattactccaggcagcattgagctgccccatcatgtcaagtacaagatccgaatggacattgacaatgtggagaggacaaataaaatcaaggatgggtaagtggaatcccatcacaccagcctggtcttggggaggtccagagcacctattatattaggacaagaggtactttattttaactaaaaatttggtagaaatttcaacaacaacaaaaaaactcaacttggtgtcatgattttggtgaaattggtacatgacttgctggaaggtttttcataggtcataaaataacagtatcttttgatttagcatttctactcaagggaattaattccaggaattttggtggcaggcacctgtaatcccagctactcgggaggctgaggcaggagaattgcttgaacccaggaggcagaggttgcagtgagctaagatcgcatcattgcactcccgcctgggcaataagagtgaaactccatctcaaaaaaaaaaaaagatacaaaaatagaaaaaggggcttggtaagggtagtagggttttgggcaatttttttttttttttttttttattgtatggttctaaaggaatggttgattacctgtggtttggttttaggtactgggaccctggtcctcgagctgacccctttgaggacatgcggtacgtctgggggggcttcgcctacttgcaggatgtggtggagcaggcaatcatcagggtgctgacgggcaccgagaagaaaactggtgtctatatgcaacagatgccctatccctgttacgttgatgacatgtaagttacctgcaagccactgtttttaaccagtttatactgtgccagatgggggtgtatatatgtgtgtgcatgtgcatgcatgtgtgaatgatctggaaataagatgccagatgtaagttgtcaacagttgcagccacatgacagacatagatatatgtgcacacactagtaaacctctttccttctcatccatggttgccacttttatctttttatttttatttt

SEQ ID NO: 730 - DNA, 4048 bp, Homo sapiens
ctttaaaaacaaaggagtttatactgagaaaagcataaacagtgatttgtatggattcacactgactaatatagctcatgccattaaagtggggtctcttctctaaaggagggttatatgatctagccccgtagacctaagtgtggtttcagacctgttcttcctggtcctctccttggaatccatatttctactagttggactttttctgtttgtctggctctcagaggattataggaggccctgtgaagtgactcagtgaattttgatttgtgggcaagtagatggttccctagtctgaaattgactttgccttaggtgcttcaattcttcataagctcccagttcttaaaggacaagatccttgtaaacatggcaatggcattcattaggaatctagctgggaaaatccagtgtgtatgcttggaaatgagggatctggggctggagagaaaggcatgggcatgccttggagggacttgtgtgtcaagctgaggacctttactttaagctctaggggaccaggcaaggggagatgtagatacgttactctgatggggtggatgaattgaagaaggatgaggcaagaatgaaggcagagaccagggaggaggctctccaagtggccaaggcataaagcaagaaatgaggcctggtgactgcttagtggcagagcagtgaaagagagggaggcatcaaagtgagtctcgatttctagctgggtgggtggtagcgatgtccagtaggccagtggctactgaggtctgcagtggaggagggtggttgggctggagacagatgatgagggagtcatcagcctgtgggtggaagaaaagggaacctcttccaactgttttctttgcttcttccctctctttctctttttttttttttttggacagagtcttgctctgtcacccaggctgaaatgcagtggcatgatcttggctcaccacagcctccgcctcctgggttcaagcaattctcctgtctcagcctccagagtagctgggattacaggcacatatcactgtgcccggctaatttttgtattttcagtggagatgggatttcaccatgttggtcgggctggaatgaactcctgacctcaagtgatccacctgcctcagcctcccaaagtgttgggattacaggcatgagccaccgcgcccggcctttcttccctctcttaaagagtgtttatttaattccacaaacatgagcttgtcaccccctgtagcctggcatctcctacacgaggtgatggctgaggcttctgcttctgctggggtagctctgatctttctgctttctctggcactgtctacccatgttgcctcaccccacaggtcccagggcacctctctcgggcaagtcttggaaccctctgacactgatttgctctcttttctgagctgcttttagccacccatcctcgggacctgttttctctctgcctccacccctgcgggcagtcttaggtctcctgcccctcacgagcaccccagagaggccacgtgctcagtgatctcagtgggcgcatctttctagtcttgctattctttttggccatgttgttcagaaaccatactgggcagggccgacttcaccctaaaggctgcgtctcttcactctgcttttgtttgttccaaataaagtggcttcagaattgctaaccctagcctctgtgaacttgtgaggtacaattttgtgtctgttatgttaacaaaaatacatacataccttcctggtgatggtataaattgctattctctattggaaagcaatttggaatgaaaatttaaagaaccattttaaaatatgctatcctgcgtacctccattccacccacccccagggatgtagcctactgaaataattttaaagaagtcaccatatgagagaaaatgttattgctatattgttattgtgagaaattggaaatagactaaatgttcagcactataggaataattaatgaaattacatatactctatacaatcattatgctgccattgaaataataaatacaaaggcgcaaggggggaaaagcttataatgttagtgaaactaagactgatttttttataaagcagcagttttcagacccttggagactccaattcggtagaaccagagcttcatcttctctgtcgaagctgtgacaggagttgcaaatgcctctcctttttgctgagtttgcagctgctgtttttccggcagcacatctgtgcaggcctctgcctcggcccctctggatctgctgattgagcagcggattgatctgtccttctctttcgtgttgacccatgtgaggaaccaactggcaagggaacaagaaatggaaataggcctcctttgcatcatgacctgtacatcctgcaattggaaaagattgtactttagttggtttaaccagcagcattatttttctaaactaagcagtaagaaggaattaggttttatgtgggatcaacagactgggtctcaaaagaggaaggtgatagaacacagtggggagggggaggtgcactagaaacagagggcctatgctttcattctggctttgctacttaatagctgtgtgacccaatcttagagacttaacctctctgaacttccattttctcatgtataaaatgggaaatattaaaggatactcactgggctggtggcttgtgcctgtaatcccagcacttggggaggttgaggtgggaggatcacttgagcccaggtgttcaagaccagcccaggcaacatggcaagactctgtctctatgaaaaaattaaaaattagccaggtgtggtggtgtgcacctgtagtcttagctacttggtaggctgagatgggaggatcacttgggcttgggaggtcaaggctgcggtgagctgtgattccatcactgcactccagcccgggcggcagagcgagacactgaatccaaacgacaacaacaacaaaaggcaaaaaaataaaagtgccctctttatggagttgtgtaaggtgaagcatatacactattcaacatagtaactatataaaggaagtattgttgttgttactgtagttaataccattaagtgagatgtttcgtatagtggaaagcacatggactctgaattcagactggtctgactttgagtctcagctccacatctagtaatactatgaccaagccctggttaaaatcatgtttttttttcttcagcctcagtcttctcacatataaaatagggacactgtcatttacctcagttttctgtgaggataaaacaacgacagtgtatatgcaagtattttgtaaattttgtagtgctcctcaagatttagttggtgtttactacttgtactttctcactggaatggcagatgctgttggacagcagggacaatgaccacttttgggaacagcagttggatggcttagattggacagcccaagacatcgtggcgtttttggccaagcacccagaggatgtccagtccagtaatggttctgtgtacacctggagagaagctttcaacgagactaaccaggcaatccggaccatatctcgcttcatggaggtgaatctgttgctgggatcatttagaaaagacttaacggcttctttctctgagacgttacaataaggttcaggcaggaggcaagtttagaaataatgtatagtctcatttacaaaactatccctcaagcctaacacaggatttgataacaaaaggcacttaataaatgttagttgagtggttgaatgagtaaataaactctagctttagtaaattaactctagcttattctatataggctcaagagaatatttctacccattttcttctaggttttcctatctcagtgactaatggtagcaaagcattcccttaaaaaggcattatttgtgaaacttatctaaaatcgaattcgggtccaattaaatttttgaaattttatattaaaaattatattagtagggatgggtaagaggtgttttggtctggttggttggttagttgctatgactcagaattgctaagaaaacagaaaagta

SEQ ID NO: 731 - DNA, 4045 bp, Homo sapiens
gatgaagaatttggagtctagtcctctttcccgcattatctggaaagctctgaagccgctgctcgttgggaagatcctgtatacacctgacactccagccacaaggcaggtcatggctgaggtaagctgcccccagcccaagactccctccccagaatctccccagaactgggggcaaaaaactcaaggtagcttcagaggtgtgcgctaagtatactcacggctcttctggaattcccagagtgaaaacctcaagtctgatgcagaccagagctgggccagctccccagtcgtgggtatagaatcatagttacaagcaggcatttcttggggatggggaggactggcacagggctgctgtgatggggtatcttttcagggaggagccaaacgctcattgtctgtgcttctcctcctttttctgcggtccctggctccccacctgactccaggtgaacaagaccttccaggaactggctgtgttccatgatctggaaggcatgtgggaggaactcagccccaagatctggaccttcatggagaacagccaagaaatggaccttgtccgggtgagtgtccctcccattattaccatgtgcctgcttgatactggagaggtgagtttctggtcactttcccaggtgtgagtgaggtgagaattctttcagtttatctagctgggggaatgtagtgagcatagctaaagtcacagggcaccacctctccagaagtacaggccatggtgcagagataacgctgtgcatatcagcatccatgccactcacggtcaaatagcagttttctgcaaaacttagtgagggctggtgtttggaagtggagttgagtaattgcagtaccctattttcctttttggctgcagcctctcagccagccacagcatctccctgtgtcttggtaggttttggaaagaagtgtgggagcaaaagcatgatgttacatgtagactggcctgagatactcattctcagggcactgtgtgaatgatgagctgctgttactgtgtggaggggaaatgcacttagtgcttcagagccacttgaaagggataagtgctctagagacaattgggttcaaatgtggagcaggctgagcaagaacagaatgtctcctttgcctgagcctgagtgctgttaatcacatcttcctgccttgggctgagttagagaatcattagactatttcctgtttccatggtgagggaggcctcttccttttgtctctgctccccttaagaagcaggtgaggattttgccaggtttcttgttttgaaccttattgactttaagggcggctgggttttagagactgtacctacctagggggaacacttccgaagtttaggactattccctgatccgctgggaggcaggttactgaggaagtccctttaaaaacaaaggagtttatactgagaaaagcataaacagtgatttgtatggattcacactgactaatatagctcatgccattaaagtggggtctcttctctaaaggagggttatatgatctagccccgtagacctaagtgtggtttcagacctgttcttcctggtcctctccttggaatccatatttctactagttggactttttctgtttgtctggctctcagaggattataggaggccctgtgaagtgactcagtgaattttgatttgtgggcaagtagatggttccctagtctgaaattgactttgccttaggtgcttcaattcttcataagctcccagttcttaaaggacaagatccttgtaaacatggcaatggcattcattaggaatctagctgggaaaatccagtgtgtatgcttggaaatgagggatctggggctggagagaaaggcatgggcatgccttggagggacttgtgtgtcaagctgaggacctttactttaagctctaggggaccaggcaaggggagatgtagatacgttactctgatggggtggatgaattgaagaaggatgaggcaagaatgaaggcagagaccagggaggaggctctccaagtggccaaggcataaagcaagaaatgaggcctggtgactgcttagtggcagagcagtgaaagagagggaggcatcaaagtgagtctcgatttctagctgggtgggtggtagcgatgtccagtaggccagtggctactgaggtctgcagtggaggagggtggttgggctggagacagatgatgagggagtcatcagcctgtgggtggaagaaaagggaacctcttccaactgttttctttgcttcttccctctctttctctttttttttttttttggacagagtcttgctctgtcacccaggctgaaatgcagtggcatgatcttggctcaccacagcctccgcctcctgggttcaagcaattctcctgtctcagcctccagagtagctgggattacaggcacatatcactgtgcccggctaatttttgtattttcagtggagatgggatttcaccatgttggtcgggctggaatgaactcctgacctcaagtgatccacctgcctcagcctcccaaagtgttgggattacaggcatgagccaccgcgcccggcctttcttccctctcttaaagagtgtttatttaattccacaaacatgagcttgtcaccccctgtagcctggcatctcctacacgaggtgatggctgaggcttctgcttctgctggggtagctctgatctttctgctttctctggcactgtctacccatgttgcctcaccccacaggtcccagggcacctctctcgggcaagtcttggaaccctctgacactgatttgctctcttttctgagctgcttttagccacccatcctcgggacctgttttctctctgcctccacccctgcgggcagtcttaggtctcctgcccctcacgagcaccccagagaggccacgtgctcagtgatctcagtgggcgcatctttctagtcttgctattctttttggccatgttgttcagaaaccatactgggcagggccgacttcaccctaaaggctgcgtctcttcactctgcttttgtttgttccaaataaagtggcttcagaattgctaaccctagcctctgtgaacttgtgaggtacaattttgtgtctgttatgttaacaaaaatacatacataccttcctggtgatggtataaattgctattctctattggaaagcaatttggaatgaaaatttaaagaaccattttaaaatatgctatcctgcgtacctccattccacccacccccagggatgtagcctactgaaataattttaaagaagtcaccatatgagagaaaatgttattgctatattgttattgtgagaaattggaaatagactaaatgttcagcactataggaataattaatgaaattacatatactctatacaatcattatgctgccattgaaataataaatacaaaggcgcaaggggggaaaagcttataatgttagtgaaactaagactgatttttttataaagcagcagttttcagacccttggagactccaattcggtagaaccagagcttcatcttctctgtcgaagctgtgacaggagttgcaaatgcctctcctttttgctgagtttgcagctgctgtttttccggcagcacatctgtgcaggcctctgcctcggcccctctggatctgctgattgagcagcggattgatctgtccttctctttcgtgttgacccatgtgaggaaccaactggcaagggaacaagaaatggaaataggcctcctttgcatcatgacctgtacatcctgcaattggaaaagattgtactttagttggtttaaccagcagcattatttttctaaactaagcagtaagaaggaattaggttttatgtgggatcaacagactgggtctcaaaagaggaaggtgatagaacacagtggggagggggaggtgcactagaaacagagggcctatgctttcattctggctttgctacttaatagctgtgtgacccaatcttagagacttaacctctctgaacttccattttctcatgtataa

SEQ ID NO: 732 - DNA, 4078 bp, Homo sapiens
agataagttacttattatatgactagtagtggtagagctggggtttcaactaagaactctctggctccaaagcccttgtaagtttctatcagtatatgaccatgcatatgagcatttgtctctcctcttcttcatagctccttactgcaatgatttgatgaagaatttggagtctagtcctctttcccgcattatctggaaagctctgaagccgctgctcgttgggaagatcctgtatacacctgacactccagccacaaggcaggtcatggctgaggtaagctgcccccagcccaagactccctccccagaatctccccagaactgggggcaaaaaactcaaggtagcttcagaggtgtgcgctaagtatactcacggctcttctggaattcccagagtgaaaacctcaagtctgatgcagaccagagctgggccagctccccagtcgtgggtatagaatcatagttacaagcaggcatttcttggggatggggaggactggcacagggctgctgtgatggggtatcttttcagggaggagccaaacgctcattgtctgtgcttctcctcctttttctgcggtccctggctccccacctgactccaggtgaacaagaccttccaggaactggctgtgttccatgatctggaaggcatgtgggaggaactcagccccaagatctggaccttcatggagaacagccaagaaatggaccttgtccgggtgagtgtccctcccattattaccatgtgcctgcttgatactggagaggtgagtttctggtcactttcccaggtgtgagtgaggtgagaattctttcagtttatctagctgggggaatgtagtgagcatagctaaagtcacagggcaccacctctccagaagtacaggccatggtgcagagataacgctgtgcatatcagcatccatgccactcacggtcaaatagcagttttctgcaaaacttagtgagggctggtgtttggaagtggagttgagtaattgcagtaccctattttcctttttggctgcagcctctcagccagccacagcatctccctgtgtcttggtaggttttggaaagaagtgtgggagcaaaagcatgatgttacatgtagactggcctgagatactcattctcagggcactgtgtgaatgatgagctgctgttactgtgtggaggggaaatgcacttagtgcttcagagccacttgaaagggataagtgctctagagacaattgggttcaaatgtggagcaggctgagcaagaacagaatgtctcctttgcctgagcctgagtgctgttaatcacatcttcctgccttgggctgagttagagaatcattagactatttcctgtttccatggtgagggaggcctcttccttttgtctctgctccccttaagaagcaggtgaggattttgccaggtttcttgttttgaaccttattgactttaagggcggctgggttttagagactgtacctacctagggggaacacttccgaagtttaggactattccctgatccgctgggaggcaggttactgaggaagtccctttaaaaacaaaggagtttatactgagaaaagcataaacagtgatttgtatggattcacactgactaatatagctcatgccattaaagtggggtctcttctctaaaggagggttatatgatctagccccgtagacctaagtgtggtttcagacctgttcttcctggtcctctccttggaatccatatttctactagttggactttttctgtttgtctggctctcagaggattataggaggccctgtgaagtgactcagtgaattttgatttgtgggcaagtagatggttccctagtctgaaattgactttgccttaggtgcttcaattcttcataagctcccagttcttaaaggacaagatccttgtaaacatggcaatggcattcattaggaatctagctgggaaaatccagtgtgtatgcttggaaatgagggatctggggctggagagaaaggcatgggcatgccttggagggacttgtgtgtcaagctgaggacctttactttaagctctaggggaccaggcaaggggagatgtagatacgttactctgatggggtggatgaattgaagaaggatgaggcaagaatgaaggcagagaccagggaggaggctctccaagtggccaaggcataaagcaagaaatgaggcctggtgactgcttagtggcagagcagtgaaagagagggaggcatcaaagtgagtctcgatttctagctgggtgggtggtagcgatgtccagtaggccagtggctactgaggtctgcagtggaggagggtggttgggctggagacagatgatgagggagtcatcagcctgtgggtggaagaaaagggaacctcttccaactgttttctttgcttcttccctctctttctctttttttttttttttggacagagtcttgctctgtcacccaggctgaaatgcagtggcatgatcttggctcaccacagcctccgcctcctgggttcaagcaattctcctgtctcagcctccagagtagctgggattacaggcacatatcactgtgcccggctaatttttgtattttcagtggagatgggatttcaccatgttggtcgggctggaatgaactcctgacctcaagtgatccacctgcctcagcctcccaaagtgttgggattacaggcatgagccaccgcgcccggcctttcttccctctcttaaagagtgtttatttaattccacaaacatgagcttgtcaccccctgtagcctggcatctcctacacgaggtgatggctgaggcttctgcttctgctggggtagctctgatctttctgctttctctggcactgtctacccatgttgcctcaccccacaggtcccagggcacctctctcgggcaagtcttggaaccctctgacactgatttgctctcttttctgagctgcttttagccacccatcctcgggacctgttttctctctgcctccacccctgcgggcagtcttaggtctcctgcccctcacgagcaccccagagaggccacgtgctcagtgatctcagtgggcgcatctttctagtcttgctattctttttggccatgttgttcagaaaccatactgggcagggccgacttcaccctaaaggctgcgtctcttcactctgcttttgtttgttccaaataaagtggcttcagaattgctaaccctagcctctgtgaacttgtgaggtacaattttgtgtctgttatgttaacaaaaatacatacataccttcctggtgatggtataaattgctattctctattggaaagcaatttggaatgaaaatttaaagaaccattttaaaatatgctatcctgcgtacctccattccacccacccccagggatgtagcctactgaaataattttaaagaagtcaccatatgagagaaaatgttattgctatattgttattgtgagaaattggaaatagactaaatgttcagcactataggaataattaatgaaattacatatactctatacaatcattatgctgccattgaaataataaatacaaaggcgcaaggggggaaaagcttataatgttagtgaaactaagactgatttttttataaagcagcagttttcagacccttggagactccaattcggtagaaccagagcttcatcttctctgtcgaagctgtgacaggagttgcaaatgcctctcctttttgctgagtttgcagctgctgtttttccggcagcacatctgtgcaggcctctgcctcggcccctctggatctgctgattgagcagcggattgatctgtccttctctttcgtgttgacccatgtgaggaaccaactggcaagggaacaagaaatggaaataggcctcctttgcatcatgacctgtacatcctgcaattggaaaagattgtactttagttggtttaaccagcagcattatttttctaaactaagcagtaagaaggaattaggttttatgtgggatcaacagactgggtctcaaaagaggaaggtgatagaacacagt

SEQ ID NO: 733 - DNA, 4045 bp, Homo sapiens
tcttcccaggcggtgtgaacacgcagtgacatttccaggaatacagggatttattaatgatttcttgtgaaatgtttggaaatacaaagtactctataaatatttcataatagcattggggctgagaactccacaaagtgccggaatacatttgcatgtaagacagaacgctgcctgggtcattgatgcctgttgagtggcagtcacagacactgcctagggtttctgactcacgctgttgggactgttctatgcagggcaccctcttgtgtggcataggatttgtgcctcaccacacactgttgtagctttgctgtcttgatgatgagtagagggcagtgtccaggccatggtataagcatctactgccccccagggttaccaaaaccaagccaagttgtgtctcagcgagctccgtgaagcatggagaagttgagtactcagagacatgacgtgacttttcaaaggctgtaagctgacgagggacatagctagggttcagacttgagtttttctttttctttttctttttcttttttttttaagactgagtcttgcttttgtcgcccaggctggattgcagtggtgcttggctcactgcaacctctgcctcccgggttcaagcaattctcctgcctcagcctccccagtagctgggattacaggcacctgccaccatgcctggccaacatttttgtatttttttagtagagatggggtttcaccatgttggccaggctggtcttgaactcctgacctcaggtgatccacccgcctcgacctcccaaagtactgggattacaggtgtgagccactgcacccggcccagactcgagtttttcatcttaatgctttttcattgcctgacactttactgagaccaagatagggaacttcacatacagtaccttttctcccaaggcggaagagggctgttcaatttctacactagagttcggggagttttagaaatgagtcagttatcgaggatgagagcagttcctgataggctcaaccacaatgagatgtagctgttcagagaaagcattcttttatctataaactggaagataatcccggtgaaacgaagcccagccccaggggcttcactaactccaggctgtgcttctcaaactttagtgagcataggaatcacctgggcatcttgtgaagctgtagatttgaattctgcaggtcggcagaggggtctcagaatccgcatttccaacaatgtctccagtaatgctgatgctgctcgtccctggaccacagattgggtagccaggttctggcaagctcatcccaaggctttgagatgacatcagacaaaatatgttctgggacatggcttttgagaggtcaagaaaataagatgtttctttctcttctcatccccaacccttgcactgcccttttctcccttcccctaccctcctttctgtccccatccctgacgccagctgttcagcatgagaagctggagtgacatgcgacaggaggtgatgtttctgaccaatgtgaacagctccagctcctccacccaaatctaccaggctgtgtctcgtattgtctgcgggcatcccgagggaggggggctgaagatcaagtctctcaactggtatgaggacaacaactacaaagccctctttggaggcaatggcactgaggaagatgctgaaaccttctatgacaactctacaagtgagtgtccatgcagaccccagccctgtccccaaccccatccctcccttagttctggccttggcctgtgtcatctcctccctctgtagcagcgttagatgtctacatgcccatttgcccaccagactgagctcttcctagaggagagaggcttctcttgaatagctacctgtccccagttctctgaatgcagcctggcacatctcaggtgcacagtagtgtttatcaatggaatgaatgattgacagccaaccttctggttttctgggggatgtggaagggtggcttccagggtgatcaagaatgagataatggcagaaggacaaatcctgcaagatctcacttatatatggaatatatgtaaggtagaaagtgtcagtttcacatgatgaataagttcctgggatcttgatgtacatcgtgatgactatagttagtaacactgtatagtatacttgaaatttgctaagagagtagatccgaagtgttcacactacacaaaaaaggcaactatgaggtgatggatttattaacagcttgattgtggtgatccttttacaaagtatacatatattaaaacatcacattgtataccttaaatatatacaatttttatttgtcagttgtaactcaaaaaagctagaaaagcatttttaaaaaggatgatgtactggtcttaatattaccattgagataagctttataataacataaaaagaaataacagtaatgataatagcaacaacaacaacaacaaagaactaacatttaagtagaatttcttgtgcactgtgcattctgtttaagttatctcattttaccctcatgataaccctgcagggaagattctttaaccccacatttcataggctcagagaggttaagtgccttggttagagccacatcagagttaatccacaagagccaggattcaagcccaaatctgcctggatctgtgctctctaagataactgttagtggtggcgtgtgtgttctcacactcagacatttgatctgccctttgtttcccattcttagctgcaaggcagtgttaaagaaccctgtgtctccatatccactccccacacttaagcacttttgtgggcccgtgtgccgtatgcctcgtggcagcagggatccaatgtcacagttttaggcagtggcatccttttccttgaaaacttgatgcaggggaacctttctccatttccaaccacaggtgtgtctttcagacactgagtgaggcaggttttgtactttattgtaacacaagaaccttttcttctctggagtaaagcactccagacattcgcaagttgctttacaagccttaaaaggatggtattgtaggcaactttaattaaatcccatctcctcctctcccccagcttgcaagttgacccaaggaagccttcatttccatgacagacttaattgtgagggcatcctcattaaaaaaaaaaaaattctattatctttccagcatatagaagatacttggtatctaaaaatccctgaaaaacttagaatgaatttttaaaaatcagggatcctgctggataaccaaacccatttgtctgttacaacttttgtatttgggtttttgttaagtgtacatatactagtttgtgttaattaaagagaatttttttttttttttttgagagggagtctcgctccgttgcccaggctggagtgcagtggcgccatctcggctcactgcaagctccgcctcccgggttcacgccattctcctgcctcagcctcctgagtagctggaactgcaggtgcccgccaccatgcccagctaattttttttttttttgtattttgagtagagacggggtttcactgtgttagccaggatggtctcgatctcctgacctcgtgatccgcctgtctcggcctcccaaagtgctgggattacaggcgtgaaccactgcgccctgttgagaatttttttttttttttttgggagacagagtttcgctcttgttgcccgggctagagtgcagtgacacaatctcggctcactgcaacctctgcctcctgggttcaagcgattctcctgcctcagcctcatgcgtcaccacgcccagctaattttgtatttttagtagagacagggtttctccatgttggtcaggctggtctcgaactcccaacctcaggtggttcgcccgccttggcctcccaaagtgctgggattgcaggcatgagccactgcgcccagccccaaattttggtttttgcttgaaaactgaggtctgaattcagccttctggttgcccctcaagagtcagtttaaatgttggtcatgttagttgtcagtgaaaacaatggt

SEQ ID NO: 734 - DNA, 4048 bp, Homo sapiens
tgggttggtggtgaggctgcctgtggaaagagaagtgagtgttttgactcactgttatttaaaaatctctagggctgttccaataagcaacaaaaggcaaaatggcctggttctctgtcccctttctgtctgtatgcctcgtacaggttatgaaaagaaaaagttgggaaaagctgtccacctcacctaattgtgttcttgtggagtgtgctagatgccccctctctggagaaaaaaaatccttgtggcctctgacccacctctggagagcctagttcccttctggaggcagaaggcaaagcttaggacctagagagtgctggaccacgccactcacaggaaccagcaggctgtgaggttgaaagctaggcatatggagctttccaggctgggtgcagggcctcgtggcccttcccctcccctctgtgctctatagctcagtcttcccaggcggtgtgaacacgcagtgacatttccaggaatacagggatttattaatgatttcttgtgaaatgtttggaaatacaaagtactctataaatatttcataatagcattggggctgagaactccacaaagtgccggaatacatttgcatgtaagacagaacgctgcctgggtcattgatgcctgttgagtggcagtcacagacactgcctagggtttctgactcacgctgttgggactgttctatgcagggcaccctcttgtgtggcataggatttgtgcctcaccacacactgttgtagctttgctgtcttgatgatgagtagagggcagtgtccaggccatggtataagcatctactgccccccagggttaccaaaaccaagccaagttgtgtctcagcgagctccgtgaagcatggagaagttgagtactcagagacatgacgtgacttttcaaaggctgtaagctgacgagggacatagctagggttcagacttgagtttttctttttctttttctttttcttttttttttaagactgagtcttgcttttgtcgcccaggctggattgcagtggtgcttggctcactgcaacctctgcctcccgggttcaagcaattctcctgcctcagcctccccagtagctgggattacaggcacctgccaccatgcctggccaacatttttgtatttttttagtagagatggggtttcaccatgttggccaggctggtcttgaactcctgacctcaggtgatccacccgcctcgacctcccaaagtactgggattacaggtgtgagccactgcacccggcccagactcgagtttttcatcttaatgctttttcattgcctgacactttactgagaccaagatagggaacttcacatacagtaccttttctcccaaggcggaagagggctgttcaatttctacactagagttcggggagttttagaaatgagtcagttatcgaggatgagagcagttcctgataggctcaaccacaatgagatgtagctgttcagagaaagcattcttttatctataaactggaagataatcccggtgaaacgaagcccagccccaggggcttcactaactccaggctgtgcttctcaaactttagtgagcataggaatcacctgggcatcttgtgaagctgtagatttgaattctgcaggtcggcagaggggtctcagaatccgcatttccaacaatgtctccagtaatgctgatgctgctcgtccctggaccacagattgggtagccaggttctggcaagctcatcccaaggctttgagatgacatcagacaaaatatgttctgggacatggcttttgagaggtcaagaaaataagatgtttctttctcttctcatccccaacccttgcactgcccttttctcccttcccctaccctcctttctgtccccatccctgacgccagctgttcagcatgagaagctggagtgacatgcgacaggaggtgatgtttctgaccaatgtgaacagctccagctcctccacccaaatctaccaggctgtgtctcgtattgtctgcgggcatcccgagggaggggggctgaagatcaagtctctcaactggtatgaggacaacaactacaaagccctctttggaggcaatggcactgaggaagatgctgaaaccttctatgacaactctacaagtgagtgtccatgcagaccccagccctgtccccaaccccatccctcccttagttctggccttggcctgtgtcatctcctccctctgtagcagcgttagatgtctacatgcccatttgcccaccagactgagctcttcctagaggagagaggcttctcttgaatagctacctgtccccagttctctgaatgcagcctggcacatctcaggtgcacagtagtgtttatcaatggaatgaatgattgacagccaaccttctggttttctgggggatgtggaagggtggcttccagggtgatcaagaatgagataatggcagaaggacaaatcctgcaagatctcacttatatatggaatatatgtaaggtagaaagtgtcagtttcacatgatgaataagttcctgggatcttgatgtacatcgtgatgactatagttagtaacactgtatagtatacttgaaatttgctaagagagtagatccgaagtgttcacactacacaaaaaaggcaactatgaggtgatggatttattaacagcttgattgtggtgatccttttacaaagtatacatatattaaaacatcacattgtataccttaaatatatacaatttttatttgtcagttgtaactcaaaaaagctagaaaagcatttttaaaaaggatgatgtactggtcttaatattaccattgagataagctttataataacataaaaagaaataacagtaatgataatagcaacaacaacaacaacaaagaactaacatttaagtagaatttcttgtgcactgtgcattctgtttaagttatctcattttaccctcatgataaccctgcagggaagattctttaaccccacatttcataggctcagagaggttaagtgccttggttagagccacatcagagttaatccacaagagccaggattcaagcccaaatctgcctggatctgtgctctctaagataactgttagtggtggcgtgtgtgttctcacactcagacatttgatctgccctttgtttcccattcttagctgcaaggcagtgttaaagaaccctgtgtctccatatccactccccacacttaagcacttttgtgggcccgtgtgccgtatgcctcgtggcagcagggatccaatgtcacagttttaggcagtggcatccttttccttgaaaacttgatgcaggggaacctttctccatttccaaccacaggtgtgtctttcagacactgagtgaggcaggttttgtactttattgtaacacaagaaccttttcttctctggagtaaagcactccagacattcgcaagttgctttacaagccttaaaaggatggtattgtaggcaactttaattaaatcccatctcctcctctcccccagcttgcaagttgacccaaggaagccttcatttccatgacagacttaattgtgagggcatcctcattaaaaaaaaaaaaattctattatctttccagcatatagaagatacttggtatctaaaaatccctgaaaaacttagaatgaatttttaaaaatcagggatcctgctggataaccaaacccatttgtctgttacaacttttgtatttgggtttttgttaagtgtacatatactagtttgtgttaattaaagagaatttttttttttttttttgagagggagtctcgctccgttgcccaggctggagtgcagtggcgccatctcggctcactgcaagctccgcctcccgggttcacgccattctcctgcctcagcctcctgagtagctggaactgcaggtgcccgccaccatgcccagctaattttttttttttttgtattttgagtagagacggggtttcactgtgttagccaggatggtctcgatctcctgacctcgtgatccgcctgtctcggc

SEQ ID NO: 735 - DNA, 4064 bp, Homo sapiens
ctgggtctacagagtgagagctgtcctcgttccagtttcactgatgacctctcgaccagctccctcacagcagtctttgccaacacagacactgtgggctgtagtgggaggaatgtggggttgaatgagctaggtttgggctctgtccttgactcaccattgcctcagtgatgtgaaaatggtgtctgatccttaaggttggaagtccaggcatgcagatttatctccatctcaataacgtggggaaaaaaaagaagtggtttttgtggaaccagtggttccactgtccacgtgtcttccagtgtgcctagcacattcccaccaagtggatcttggttcatgagggaaagaagggaaagtgagggtgccccgaggctcccagaagacaagtaatgtcacagctgagctgtgtacagatcgaagaagcagatggataaggagtgaacaaagtcatccttgtcttgaggggtctttatttagcttcttcttgactcttagacaaggacccagaatacagatggggcttgttgttaccttcagcctcatggctttttagggctagatacttcagcttgttacatgcagtccttaaagcgtctgtgtgggtttttgcaggagagaacacttgctcgtgttctcctgtctggaacccggacattgttggaaagtatcagattttgtttggctttgtgtgatttgactgcccacctgtttacttgctttctcccagcaagcagccgcaatccccatgggttggtaatgggtggaatgacacactgtgtagatttactcttcagactctatgttcacctcattcttatgggaaaagaagagcactagctggtagatatagcagtgtgttaatatgactgctcaactccatttacacagacattttcaccttagttatactatttcttcattaaatattgttgccagatctaagatacaggtttaattttttcctctgaattatgtggtagtagatgtatttaactatgtttagaaacagcaaaaaatgaagcgtttgaatgcgttaaacacatctaatttgaaagttaatatttaggttgttgatttattttttaaaagattagaatattccttagaaatgtagtcttataatttcgtatttcaataaaaaatattaaaatgtttcccagaggaaatctttactgtcatagaaatcaccagaaagagatagcaattactcctgggtggtgatagtctttgatttgtggtttacttgttttcagtttgaactaaaacatactaatcccagcctgagttggattttgcatatggtcaaagtgaagtagagatttttgtctactttatgaagatatttaaaggacatttgaaatgtttcaatgaacacattgtaacatgcattcccaggaggaaaacaaaattgtgtattgtgttgaaaatactattccaatatatgtatacccacgtctcattttgtcatagaattcctgaaaaatttagatgtagatgagatttttataagttgaaaatattttcagttgcattttaattgcacagatgtgttttctacttctatttggctgtgactcctaatgcattgtaatattatcttccagtgttcatttcgtgtagtgataatggattaacaaatgcattcattcatttagtaaacatttactgagccctaatcagtgccatgctctggcccagggaggtagtcatgtgcaaggtccagccctctctgtttcattcctggttggggaatgggtgggacagaccaggaaaggagcagctgccgtatagagcaggagacgctctgctgggtgtgatacagtccctgatggggcctcctactgcagtctttccagtcaggaaggaaacatcctctaagtggggacctaaagaatggatgtcagccaggtaaagaacagggagtagaatgttccaggtagaggacatagtatatgcattggtccagagaggagagggaagagaaggtggcatttaggggaactgtacctgattgagatagttcagcatggagcagatatagctgtggggagtttgatgggagaaggaacgatgagacgtgatgcctgcagaggtgggcaaaggtcggctgaggcaggtctttcttcacgagccatgtgaggatatagggccttatcctcagagtaaagggagccattaaaggctccacaggctgagtgacttgatgaggtgaatacgaaacagagcatttctgtgaatgtgaatggcctttggagcagaactaagttcatgaggatggaaagaatataatgaagccatctcttagacccagaaagaatggggcacaacagcctttatctttctggggccaatgtcacagaatgccatgcttttaggaaacatggtatgttgtgattaacacattttgcagaagtgggtgggagcttttgaataataacagtaagcatttgtgcattcttcctgtaatgacattacagttatgatctgaaaatattgagtcatacatgaattcctgttatcttaactcagaaaatatagtccctcactaaaggttttattttccttctttttcccatttcctttacttcgtataagaaagtcacttgtctcctgggtgcaatggagacctatgtgagttcatagccaagagaatgtttttggttagaaaaataatagtaggaattccaagctgtgaattttttactgaagctctttggaaataggatttggcaagttttgtctgccttcgtcaagtaagcatgagcaggagagcacagttaatagcaggtgcagacacatgattctcagaccgtattttgtgttctagtttcaaggcatgaattctttcctggggttaattttattcaaggaagttatctgtctgttagatctgatatgtgctcaggccaacatagattctttacccttcctttcttcctgctcacctgtccttcctcttttatcttttcattgaattaaaaagaaaattatgaaatagtttcaacatgaaaaaaggtacagagaataacataaagaacactcctggctgggtgtggtggctcacgcctgcaatcccagcactttgggagtctgaggcagccagatcactggaggtcaggagttggagaccagcttggccaacatggtgaaacactgcctctactgaaaatacaagaattagccaggcatggtggcgtgcacttgtaatcccagctacgtgagagactgaggcaggagaattgcttgaacccaggagggggaggttgcagtgagctgagatcacaccactgcactctagcctgggtgacagagtgagactccgtcttcaaacaaacaaacaaacaaaaagaacactcctgtaccatcatccatcattttgccgtgctgactccaggttctatttaagaaataaaacattacaggtacagctgatgccacctctgtttccctagctcattcttcagagataactcttgtcttgcagttggatgttttaatcctctatatcatgtatacttacattctatgtataacaatatttggtactggcctaaatgtgttcacattgtataagtgtgcatattggcctgccacttcatttggaattatgttcttgagatttatcaatgttgatacatgtggaatctggttaatttttgccatagtattctatttttatactaaacttttaaaaatccatgcttctagtctttggcttattttttcaggttatggtatgttttggatgcacagaaaagtaaaattaagtcatgagcaaaatatctggataatccaagctttaaacttgatgtagaatttgaatcatgtgtgttttgttaaccctgtgatgtcaatccatgcctgattgtgtaactccaaccaatattcctttgaaaatggaaatttgtttatattgactacagattgccaatattattagtaaatgctgagcacttaatctcgaataaagaactagtttaaaaatgattctaacaatggcattgactgttctaccttattactcatgggtgggttcagccaatgtttctgttggagaccaa

SEQ ID NO: 736 - DNA, 4035 bp, Homo sapiens
ctggactcaactcaaaagatatccttttgatgagaacaaaggtgggtggatatatgaaatattatctgtgggataaatgcacttagtcatgagggagacttgttatggagtgcgctcattgtatttgtactgttgagttaacaacttctaggaggagctcagggccacctggcaggggcttcttttgtcttgctgctcagcaaggtgtattttgctgtagagtgtgctgggcaggtgaacttttcttaactttctcttgggtccttcctaaagcagcatgtacctttcccagagcgaggagagggccaccttcctgtctcacagaaacctccaatctgttttggactgcaggaaggagccatagtagtggaccagcaaattttggcccgagagattgatttgcttccgattgtactttttttttttattgctactataacaagtcaccaaatacttagcagtttataaccacatacatttattatttcataaggccagaagccaggatacagtagagctcacctaggtctacttcttagaggctcacagggctgatatcaaggtgtttgtggggctgtgtttttttgggggggctctgaagatgaatctgctttggagctcatccaggatatcagatgaattcagtcccgtgcagttgtaggactgaagtccatttccttgctggctgtcagcaggggctggtttttgctcctaaaggttgccatcattccttcttatgcttttcatgtgactcctctcccacaagtgggttgagtatctctcacactttaaacctctgacgcctcctgtcacatctgtctccagtcagagaaagttctttacttttaagggctcaggtgtttagtttgggcccattcacataatccaggataatctccttattttgaggttcataactttaattacatctacacagtgcatttgctatgaaatgtgcatattcacagactccaggaatagggtgtggacatctttgcaggggatattcagtctgctgtagctttcttgattggaaggaatagtttatcatatatttgaagtgttccctcagtgcctttggcttttgttgacccctctgcagctctctgctttttcttgcccatatttggaaagtgactctaaagcataataagcatcacctattagggtttttaatgtacaaaccaaacagaggtgactttgggaggagaacatctctgaactaggtatgagacattcatcgaaaaaaatccatcaagtgtttattgtatgtctgctttataccagcactgttctaggcactgaagttcgaccaccaacaaggcagttgtgatgcacttggagctttcattctgatgggcattgagatccaggctgaaggctgagtctgggaatttgaggaattctttgtaggtcctgggtctacagagtgagagctgtcctcgttccagtttcactgatgacctctcgaccagctccctcacagcagtctttgccaacacagacactgtgggctgtagtgggaggaatgtggggttgaatgagctaggtttgggctctgtccttgactcaccattgcctcagtgatgtgaaaatggtgtctgatccttaaggttggaagtccaggcatgcagatttatctccatctcaataacgtggggaaaaaaaagaagtggtttttgtggaaccagtggttccactgtccacgtgtcttccagtgtgcctagcacattcccaccaagtggatcttggttcatgagggaaagaagggaaagtgagggtgccccgaggctcccagaagacaagtaatgtcacagctgagctgtgtacagatcgaagaagcagatggataaggagtgaacaaagtcatccttgtcttgaggggtctttatttagcttcttcttgactcttagacaaggacccagaatacagatggggcttgttgttaccttcagcctcatggctttttagggctagatacttcagcttgttacatgcagtccttaaagcgtctgtgtgggtttttgcaggagagaacacttgctcgtgttctcctgtctggaacccggacattgttggaaagtatcagattttgtttggctttgtgtgatttgactgcccacctgtttacttgctttctcccagcaagcagccgcaatccccatgggttggtaatgggtggaatgacacactgtgtagatttactcttcagactctatgttcacctcattcttatgggaaaagaagagcactagctggtagatatagcagtgtgttaatatgactgctcaactccatttacacagacattttcaccttagttatactatttcttcattaaatattgttgccagatctaagatacaggtttaattttttcctctgaattatgtggtagtagatgtatttaactatgtttagaaacagcaaaaaatgaagcgtttgaatgcgttaaacacatctaatttgaaagttaatatttaggttgttgatttattttttaaaagattagaatattccttagaaatgtagtcttataatttcgtatttcaataaaaaatattaaaatgtttcccagaggaaatctttactgtcatagaaatcaccagaaagagatagcaattactcctgggtggtgatagtctttgatttgtggtttacttgttttcagtttgaactaaaacatactaatcccagcctgagttggattttgcatatggtcaaagtgaagtagagatttttgtctactttatgaagatatttaaaggacatttgaaatgtttcaatgaacacattgtaacatgcattcccaggaggaaaacaaaattgtgtattgtgttgaaaatactattccaatatatgtatacccacgtctcattttgtcatagaattcctgaaaaatttagatgtagatgagatttttataagttgaaaatattttcagttgcattttaattgcacagatgtgttttctacttctatttggctgtgactcctaatgcattgtaatattatcttccagtgttcatttcgtgtagtgataatggattaacaaatgcattcattcatttagtaaacatttactgagccctaatcagtgccatgctctggcccagggaggtagtcatgtgcaaggtccagccctctctgtttcattcctggttggggaatgggtgggacagaccaggaaaggagcagctgccgtatagagcaggagacgctctgctgggtgtgatacagtccctgatggggcctcctactgcagtctttccagtcaggaaggaaacatcctctaagtggggacctaaagaatggatgtcagccaggtaaagaacagggagtagaatgttccaggtagaggacatagtatatgcattggtccagagaggagagggaagagaaggtggcatttaggggaactgtacctgattgagatagttcagcatggagcagatatagctgtggggagtttgatgggagaaggaacgatgagacgtgatgcctgcagaggtgggcaaaggtcggctgaggcaggtctttcttcacgagccatgtgaggatatagggccttatcctcagagtaaagggagccattaaaggctccacaggctgagtgacttgatgaggtgaatacgaaacagagcatttctgtgaatgtgaatggcctttggagcagaactaagttcatgaggatggaaagaatataatgaagccatctcttagacccagaaagaatggggcacaacagcctttatctttctggggccaatgtcacagaatgccatgcttttaggaaacatggtatgttgtgattaacacattttgcagaagtgggtgggagcttttgaataataacagtaagcatttgtgcattcttcctgtaatgacattacagttatgatctgaaaatattgagtcatacatgaattcctgttatcttaactcagaaaatatagtccctcactaaaggttttattttccttctttttcccatttcctttacttcgtataagaaagtcacttgtctcctgggt

SEQ ID NO: 737 - DNA, 4084 bp, Homo sapiens
ttttttttttttttttttgagttggagtctcgctctgtcacccaggctggagtgcagtggcgtgatctcagctcactacaacctctgcctcccaggttcaagtgattctctgcttcagcctcctgagtagctgggattacaggcatgcaccaccacacctggctaattgttgtatttttagtagagacggggtttcaccatgttggttggccagactggtcttgaactcctgacctcaggtgatccgtctgccttggcctcccaaagtgttggaattacagacatgacccactgcacccggcctgttgtcagtattcttaaacatagacactaactgtaggctgacagcctagcagcaaggaccagttaaagaaatgagtagaactgaagtgtgcttgagtatctctggcagtcagcaaaaacttaatgggaatcatggtaggccaaatgttctgcagtatttcaaaagctgcatgggttttgagaggcttttggtccatcactcaccttaggttgttctacaagcacatcagcctgccccaatttaaacagggcagttagtaatggtgtaataaagagtctgcattgttcattccttcaacaaatactggctataatgtttcagcactgtggatgcaaagtgagcaggataaacaggctcttctttcaaagcttgtggtccactggaccacgtatgaagtagaatagtttaggtccagaaaggcaattaagtaaaatatgaccaagaagaggctctctagtgggtttggtataaagaaaagataagaatgatttagaattggcctatcaatgagataagaggcctggctttctggcactctgctctagggcaagtaaaatggagaattccaaattctgaaattgttagaacatagttctgtgtcttagttaaatatctacacttacagataaatagcataaatgctttctccccatatttcagcccagtcctacttaaagacaacataaattgcaaaatagtgaggatgttgttcatctaataaaagtggttccaggaattcagactctggattcctgtttgccaaatcatgtgtcccactcttaagaaaacgagttggactctggatttttctttgcaagagggacaagagtgtgggagatactgagttaatgcaacttgcaggttttaagtgtcctgtcattgtgccttgtgctttgatacattctgagtttcagtaaagagacctgatgcattggactgttgcaatggaacctgttttaagatcttcaaagctgtattgatatgaagttctccaaaagacttcaaggacccagcttccaatcttcataatcctcttgtgcttgtctctctttgcatgaaatgcttccaggtatttttgcaaggctaccagttacatttgacaagtctgtgcaatggatcaaaatcagaagagatgattcaacttggtgaccaagaagtttctgagctttgtggcctaccaagggagaaactggctgcagcagagcgagtacttcgttccaacatggacatcctgaagccaatcctggtgagtagacttgctcactggagaaacttcaagcactaatgctttcggaatgtgaggcttttccttggacagcatgactttgttttgtagaaaagtacggctggctgggagtttgtgatataatttagttcagtggtattctaagtgttcttagtgttctttcagacttttgggccatctcccaaagggtgaatgggaagaataagctgggtgtggctgagtttaagccaaaagttttttgtgcttgtttcaatcagagaagacctgctttttcatgtttttactattataatactaagcaagagctcatttgaaaacagagttcttcatatttaaaaaaaaaaagtcttgaaaccattgatgggaagatggatatctatttatgtttaaaaacccatcataaagatgacattgtgggctgtcacagttggaaggccctggaattagatgagaccacactatttagcttacttagtaataacattgcaaagaaaaattccgacgaagttttttcagcctaggaatcaatagttcagagaagcactctatgagaatacccattcattcttaaccaaaaaatactggtgagcctgagcagtttggtcatcagagtgttttatatagttccagaacaaatatgtctctaggtgttctgagagctctggtgaaattcctctcgctaccccaaacatcatcatttaatatccaggattctggttttctactcaccagatagattctcttaaaaccagggaaagattcctggaggaaggatgtatctggaaagagatgttccttattataataaaatgaaattgtaatactcttggattttgtgcagcacgaattctttatagagagttggtcctcccagagaattaagaatactcagtttctggaccctgttcccagatcataccctagaatgtgaccttagaaacacacttcaggattcatacctttgattgaccatcaaaaagtttttgtatcggccaggtgtggtggctcacgcctgtaatcccaccactttcggatgccacggcgggcagatcacgtgaggtcagcagtttgagaccagcctggccaacatggtgaaaccctgtctctacaaaaatacaaaaaatagccgggcgtgatggtgggcacctgtaattccagctactcgggaggctgaggcaggaggatcgcttgagcctaggaggtggaggctgcagtgagctgagatctgtctcactctgttgcccaggctggagtgcagtggcgcgatctcgactcactgcaacctccgcctctcaggcttaagtgattctcatgcctcagcctccgagtacctgggactacaggcacctgccaccacgcccagctattttttgtatttttagtagacatagggtttcactatgttgcccagctggtctcgaactcctgagctcaagtgatctgcccacctcggcctcccaaagtgttgggattaaaggcatgagtcaccgtgcctggtcccatgttataattttaaagtaaggtatatttctctacagggatctttgcaaccctaagtaactggcctaaaaagttagagaagctgacttgtgcagacatttgcagcctgttggtcttttttgtgctgtgaatcatagagggtgaaaggttattatgaatggtacaaaactttgttacaaaaccattttcttggactgttttgggctgcttcactgcatgacaaatgctcaccctttcagctggaatgattgaaattttggaaaagatgggtgtttttagaagacattgtaatttgttccggtgctgtgcccattcattccatttcacttctgtttactcattaaacacctattgtgtacacaacccggtaaaatccctccactcacacaatgcctgaattatactcatagtagaatgactgtttagccctcatcatctgataattaacagctcaggtttcaacctgacagtatctctctgggaggattagcagcgtgacagagtgcagggaaatgcaccttcagaaccgtcagctacactgtgtcccatcctgctgtgttgtggttgtgccttgtggatgcgttggtttatgaccaggtattgattaaggtggctactaccaggtgctttctgcatatctcgggtttgtggagcactcaggttctgcttctgcccctctgctgttaccaagagacctctcttcaaaatggggctcttgagttagagtagaatgagtgatcaggattgttttgtgtaaagatgatttctgaggaaggctttaggatgaaatgacttccaaacattttgaaatgtgactcttacttattgaattaagcagggccttaattggaatgctgggactgatacttgatttgcattaagcagcctttttctattgctgcttggttgaaatttcaacatttgtgatggtagatggatgtgacatgtgatgacattgcacatgggcagttaactgtgccaagaagtgcagcagtagcagcaaccggagatgcaaagcccaacatgatggggag

SEQ ID NO: 738 - DNA, 4045 bp, Homo sapiens
tcaatacttgtgtaaggaaaggaaagggaacaaagcatgattgggcagaggcagaagatgacatcaacaaaggccctccgttgtcagtattctttttttttttttttttttgagttggagtctcgctctgtcacccaggctggagtgcagtggcgtgatctcagctcactacaacctctgcctcccaggttcaagtgattctctgcttcagcctcctgagtagctgggattacaggcatgcaccaccacacctggctaattgttgtatttttagtagagacggggtttcaccatgttggttggccagactggtcttgaactcctgacctcaggtgatccgtctgccttggcctcccaaagtgttggaattacagacatgacccactgcacccggcctgttgtcagtattcttaaacatagacactaactgtaggctgacagcctagcagcaaggaccagttaaagaaatgagtagaactgaagtgtgcttgagtatctctggcagtcagcaaaaacttaatgggaatcatggtaggccaaatgttctgcagtatttcaaaagctgcatgggttttgagaggcttttggtccatcactcaccttaggttgttctacaagcacatcagcctgccccaatttaaacagggcagttagtaatggtgtaataaagagtctgcattgttcattccttcaacaaatactggctataatgtttcagcactgtggatgcaaagtgagcaggataaacaggctcttctttcaaagcttgtggtccactggaccacgtatgaagtagaatagtttaggtccagaaaggcaattaagtaaaatatgaccaagaagaggctctctagtgggtttggtataaagaaaagataagaatgatttagaattggcctatcaatgagataagaggcctggctttctggcactctgctctagggcaagtaaaatggagaattccaaattctgaaattgttagaacatagttctgtgtcttagttaaatatctacacttacagataaatagcataaatgctttctccccatatttcagcccagtcctacttaaagacaacataaattgcaaaatagtgaggatgttgttcatctaataaaagtggttccaggaattcagactctggattcctgtttgccaaatcatgtgtcccactcttaagaaaacgagttggactctggatttttctttgcaagagggacaagagtgtgggagatactgagttaatgcaacttgcaggttttaagtgtcctgtcattgtgccttgtgctttgatacattctgagtttcagtaaagagacctgatgcattggactgttgcaatggaacctgttttaagatcttcaaagctgtattgatatgaagttctccaaaagacttcaaggacccagcttccaatcttcataatcctcttgtgcttgtctctctttgcatgaaatgcttccaggtatttttgcaaggctaccagttacatttgacaagtctgtgcaatggatcaaaatcagaagagatgattcaacttggtgaccaagaagtttctgagctttgtggcctaccaagggagaaactggctgcagcagagcgagtacttcgttccaacatggacatcctgaagccaatcctggtgagtagacttgctcactggagaaacttcaagcactaatgctttcggaatgtgaggcttttccttggacagcatgactttgttttgtagaaaagtacggctggctgggagtttgtgatataatttagttcagtggtattctaagtgttcttagtgttctttcagacttttgggccatctcccaaagggtgaatgggaagaataagctgggtgtggctgagtttaagccaaaagttttttgtgcttgtttcaatcagagaagacctgctttttcatgtttttactattataatactaagcaagagctcatttgaaaacagagttcttcatatttaaaaaaaaaaagtcttgaaaccattgatgggaagatggatatctatttatgtttaaaaacccatcataaagatgacattgtgggctgtcacagttggaaggccctggaattagatgagaccacactatttagcttacttagtaataacattgcaaagaaaaattccgacgaagttttttcagcctaggaatcaatagttcagagaagcactctatgagaatacccattcattcttaaccaaaaaatactggtgagcctgagcagtttggtcatcagagtgttttatatagttccagaacaaatatgtctctaggtgttctgagagctctggtgaaattcctctcgctaccccaaacatcatcatttaatatccaggattctggttttctactcaccagatagattctcttaaaaccagggaaagattcctggaggaaggatgtatctggaaagagatgttccttattataataaaatgaaattgtaatactcttggattttgtgcagcacgaattctttatagagagttggtcctcccagagaattaagaatactcagtttctggaccctgttcccagatcataccctagaatgtgaccttagaaacacacttcaggattcatacctttgattgaccatcaaaaagtttttgtatcggccaggtgtggtggctcacgcctgtaatcccaccactttcggatgccacggcgggcagatcacgtgaggtcagcagtttgagaccagcctggccaacatggtgaaaccctgtctctacaaaaatacaaaaaatagccgggcgtgatggtgggcacctgtaattccagctactcgggaggctgaggcaggaggatcgcttgagcctaggaggtggaggctgcagtgagctgagatctgtctcactctgttgcccaggctggagtgcagtggcgcgatctcgactcactgcaacctccgcctctcaggcttaagtgattctcatgcctcagcctccgagtacctgggactacaggcacctgccaccacgcccagctattttttgtatttttagtagacatagggtttcactatgttgcccagctggtctcgaactcctgagctcaagtgatctgcccacctcggcctcccaaagtgttgggattaaaggcatgagtcaccgtgcctggtcccatgttataattttaaagtaaggtatatttctctacagggatctttgcaaccctaagtaactggcctaaaaagttagagaagctgacttgtgcagacatttgcagcctgttggtcttttttgtgctgtgaatcatagagggtgaaaggttattatgaatggtacaaaactttgttacaaaaccattttcttggactgttttgggctgcttcactgcatgacaaatgctcaccctttcagctggaatgattgaaattttggaaaagatgggtgtttttagaagacattgtaatttgttccggtgctgtgcccattcattccatttcacttctgtttactcattaaacacctattgtgtacacaacccggtaaaatccctccactcacacaatgcctgaattatactcatagtagaatgactgtttagccctcatcatctgataattaacagctcaggtttcaacctgacagtatctctctgggaggattagcagcgtgacagagtgcagggaaatgcaccttcagaaccgtcagctacactgtgtcccatcctgctgtgttgtggttgtgccttgtggatgcgttggtttatgaccaggtattgattaaggtggctactaccaggtgctttctgcatatctcgggtttgtggagcactcaggttctgcttctgcccctctgctgttaccaagagacctctcttcaaaatggggctcttgagttagagtagaatgagtgatcaggattgttttgtgtaaagatgatttctgaggaaggctttaggatgaaatgacttccaaacattttgaaatgtgactcttacttattgaattaagcagggccttaattggaatgctgggactgatacttgatttgcattaagcagcctttttctattgctgc

SEQ ID NO: 739 - DNA, 4026 bp, Homo sapiens
atgaagcttaggtgctctgaggtttgacaactgcagtagagagcctaatgctaacagtgtagagtcacatgtgatgggaagcatcaggtaggtagcagtttgcaggagcactgattctgagggacactaactgggcctaagaacagctactggctgtcatgaggaataactaggagctagccatagaggggtagcagtgaatcatttctctagcgatgtaaatcttgctcaatttattctgtctatataactcaatattactgaagtttgcctaaagcagaatacacctggatcatacagcatttatgagagactggctgggctgtcaggccctcctgttactttatctctgcatgtgaccctcttagctccgcggattaactcctgtcctcattaagcctcacactgtagccccattttcagatcaaacctgtttctcttctggtaaatgatttcagtttgcaaagtttgccctctagaggttgcttagtgcctggccatgtgggctcagttcatgtggtcctgatgagctggttttatctttattacaaagaagttaggctgttaggagagtgggttggaaggagaagaggtagacagccaaatgagatgagtcagggaaaactatactgtttcggagtcatagggctcctaccaagcatctggtcagaaacctctcattttggagatcaagaaattgaggttcagaaagatgacatgaggtacgcagggacgccaccagacacagcctccaactctagaaactaaaattctggattcttagtgctgctttttctgttttgttgcactggattgaagccttttctaactgtactcagagggcctattatttagggagattccgtatgaaatcctttagcaatcaaatcatttaatagggctgatggtttaaatatatgttaatgtgttttcctaaagcctggcagacctgggttttggagctttgtatcacatgttttatgtttggaatgaaaatgagaccatgtctgtgaaggcactttgatatgcgtaatgcactctgccagtgtttgtcaaaacatggtccccaggtcagcagcatcagcatcacctgtaagtgattctccagtcgcatcccagggccgctgtatcagaaactctgggggtgggggtgggggtgggggtgggggtgggggtgggggtgggggtgggggccggcccggcccggcccggcccggcccggcccggcccggcccggcccggcccggcccggcccggcccggcagtctgcattttaacaagctctccaggtgattctgatgcatacttaagtttgagaaccattgcttgttttgcattaaacaggagattagtctctgcagcttgtgggaataaagctttaaatctctccaattttagctctgtgaaaaggcagtggggagacaggaatgaacggactagtgccacaaagctcaggtggggtgggtgagatcatttagaagagaaagaccgggcatggtggctcacgcctgtactgtcagcactttgggaggccaaggcaggttggatcacaaggtcaggagtttgagaccagcctgcctatcatggtgaaaccctgtctgtactaaagataaaaaaaaaaaaatttgccagtcatggtgatgcatacctgtaatcccagctactcgggaggctgaggcaggagaatctcttgaacccgggaggcgggggttgcagtgagctgagattccaccattgcactccaacctaggtgacagggtgagactccgtctcaaaataaaaaaaaaaaaagaaaaggaaaggctgtgtgtgtgtgtatgtgtgtgtgtgtgtgtgtgtgtgtgtaacagcaccatcacactgtttgagttgaggagcacatgctgagtgtggctcaacatgttaccagaaagcaatattttcatgcctctcctgatatggcgatgctcccctatctcattcctgtgtgtgtttagccaggcaactgttgatcatcaatattatgataacgtttctccactgtcccattgtgcccactttttttttttttttgagttacttactaaataaaaataaaacactatttctcaatagacttgaagcttcaagatttcctggtggacaatgaaaccttctctgggttcctgtatcacaacctctctctcccaaagtctactgtggacaagatgctgagggctgatgtcattctccacaaggtaagctgatgcctccagcttcctcagtagggctgatggcaattacgttgtgcagctactggaaagaaatgaataaacccttgtccttgtaatggtggtgaaggggagggaggtagtttgaatacaacttcacttaattttacttccctattcaggcaggaattgccaaaccatccaggagtggaatatgcaacctggcgtcatgggccagctggttaaaataaaattgatttctggcttatcacttggcatttgtgatgatttcctcctacaagggatacattttaagttgagttaaacttaaaaaatattcacagttctgaggcaataaccgtggttaagggttattgatctggaggagctctgtctaaaaaattgaggacaggagactttagacaagggtgtatttggagacttttaagaattttataaaataagggctggacgcagtggcactgagttgagaactgttgcttgctttgcattaaataggagatcagtccctgcagcttgtgggaataaggctttaaatctctccaattttagctctgtgagatggcactggggaaacagaaatgaacggactagtgtcacaaagctcaggtgggatggacgagatcacttcaaaggtctgtaatcccacgtctataatcccagcactttgggaggccaaggcgggaaaatcacttgaggtcaggagttcgagaccatcctggccaacatggcaaagcctgtctctactaaaaatatgaaaattagctcagcgtggtggcatgctcctgtagtcccagctactcgtgaggctgagacaggagaatcgtttgaacctgggaggcggaggttgcagtgagccaatatcacgccattgcactccagcctggctgacagagtgagactccatctcaaaaaaaaaaaaaaaaaaagaattttataaaatcaggaaataatattagtgtttatgttgaattttaactttagaatcatagaaaacttcctctggcatcattattagacagctcttgtgcagtgggtagcaccagacccagcttgcatggttattgatttttcagagacactttttgagcttattctctggcagaaaggggaactgcttcctcccctatctcgtgtctgcatactagcttgtctttacaagaagcagaagtagtggaaatgtttattcttgaaaataagctttttgcttcacatgatctagaatttttaaaattagaaaaatgtgcttactgcgtgcccttctgaaactaggaaaatatgccttgtgtttaccaattgtgtggttaggagatgggccaaaggcatcaggcttttgaaagtagttgcatttagcataatttccattgccccctgccaatttcatatctgtcacatctaatcagtttaaaataaggggcatcctaagcatggagatggtccttggatggtccttggagtttctgtattttcagtattcttttttttgagcatacaagacatttattgaaaaattcttgggatcaatacttgtgtaaggaaaggaaagggaacaaagcatgattgggcagaggcagaagatgacatcaacaaaggccctccgttgtcagtattctttttttttttttttttttgagttggagtctcgctctgtcacccaggctggagtgcagtggcgtgatctcagctcactacaacctctgcctcccaggttcaagtgattctctgcttcagcctcctgagtagctgggattacaggcatgcaccaccacacctggctaattgttgtatttttagtagagacggggtttcaccatgt

SEQ ID NO: 740 - DNA, 4044 bp, Homo sapiens
ttggtgctagtgtgtgagtctaagcctacatgggtggatatccacgtgatcaggctgcaagttctttgtagtggaggatctttggccctccctgctgcttcccaacccagcgaacctaccacaccatgcacgtgcacagccaagggttgttgactgtttaatcagtctctgggttcttatgtctcatccgggggattcactgataggaggctggagcttgatcacatccagatgttctcatcttcagagcctgttaacataacagaagtcttataaacatgctgagcacactcactggtctggagagtgttgcaggatgacctaggcccattgcaggggtggcctgggtcgccctcccacacttctgccaccctgcttgggaaggagggagctgttttgaagttccctggtgcaatatgatgtattgctctggctctgctcaggaggaagctatggcccacctagtcagtgagggttagctaatacgtgtattctgtttctgttgaggtttcacagaggccttttttgacccttcattttatagataaggcagtggaggcacaactacatgaaatgactcgacaaataaatggatttagaacccaggtttctgactcccagggtggtgctttttccatggttgtacagtgattaatgtctaccttttcacaccagtcctcaactgaagacaccagcttacaccttccttcctgtttctcccaagaacagaaagtgaccccggatgtcgctttctgttcctgggaaggcagttccagtggttagaagtcctgttcactcctggggtgtggcctggggatggtcctgacatccctgggctcttcctggacctggccagctaaaaggaaatctcctatgatggtactcagatacttttggaaccttgtcagccctaatcccatctcctagtgtttagtattcagctacccttcactgggcagtaattctgtgccaggcctgatctgggcattggtggtactaagaacgcatattccctatcctataggcatagtctggtagagacaacatgcaagtaaaacaatgttccttaaactgtggttccacacctccctcccccaacattaaaagtgtaagggatgcttattcaaatgtagatttgtaggctctgcactctagacccactatttcagaatctctggggactgggcccaagaaactgcattttcgcatgctccctaaatgaagcttaggtgctctgaggtttgacaactgcagtagagagcctaatgctaacagtgtagagtcacatgtgatgggaagcatcaggtaggtagcagtttgcaggagcactgattctgagggacactaactgggcctaagaacagctactggctgtcatgaggaataactaggagctagccatagaggggtagcagtgaatcatttctctagcgatgtaaatcttgctcaatttattctgtctatataactcaatattactgaagtttgcctaaagcagaatacacctggatcatacagcatttatgagagactggctgggctgtcaggccctcctgttactttatctctgcatgtgaccctcttagctccgcggattaactcctgtcctcattaagcctcacactgtagccccattttcagatcaaacctgtttctcttctggtaaatgatttcagtttgcaaagtttgccctctagaggttgcttagtgcctggccatgtgggctcagttcatgtggtcctgatgagctggttttatctttattacaaagaagttaggctgttaggagagtgggttggaaggagaagaggtagacagccaaatgagatgagtcagggaaaactatactgtttcggagtcatagggctcctaccaagcatctggtcagaaacctctcattttggagatcaagaaattgaggttcagaaagatgacatgaggtacgcagggacgccaccagacacagcctccaactctagaaactaaaattctggattcttagtgctgctttttctgttttgttgcactggattgaagccttttctaactgtactcagagggcctattatttagggagattccgtatgaaatcctttagcaatcaaatcatttaatagggctgatggtttaaatatatgttaatgtgttttcctaaagcctggcagacctgggttttggagctttgtatcacatgttttatgtttggaatgaaaatgagaccatgtctgtgaaggcactttgatatgcgtaatgcactctgccagtgtttgtcaaaacatggtccccaggtcagcagcatcagcatcacctgtaagtgattctccagtcgcatcccagggccgctgtatcagaaactctgggggtgggggtgggggtgggggtgggggtgggggtgggggtgggggtgggggccggcccggcccggcccggcccggcccggcccggcccggcccggcccggcccggcccggcccggcccggcagtctgcattttaacaagctctccaggtgattctgatgcatacttaagtttgagaaccattgcttgttttgcattaaacaggagattagtctctgcagcttgtgggaataaagctttaaatctctccaattttagctctgtgaaaaggcagtggggagacaggaatgaacggactagtgccacaaagctcaggtggggtgggtgagatcatttagaagagaaagaccgggcatggtggctcacgcctgtactgtcagcactttgggaggccaaggcaggttggatcacaaggtcaggagtttgagaccagcctgcctatcatggtgaaaccctgtctgtactaaagataaaaaaaaaaaaatttgccagtcatggtgatgcatacctgtaatcccagctactcgggaggctgaggcaggagaatctcttgaacccgggaggcgggggttgcagtgagctgagattccaccattgcactccaacctaggtgacagggtgagactccgtctcaaaataaaaaaaaaaaaagaaaaggaaaggctgtgtgtgtgtgtatgtgtgtgtgtgtgtgtgtgtgtgtgtaacagcaccatcacactgtttgagttgaggagcacatgctgagtgtggctcaacatgttaccagaaagcaatattttcatgcctctcctgatatggcgatgctcccctatctcattcctgtgtgtgtttagccaggcaactgttgatcatcaatattatgataacgtttctccactgtcccattgtgcccactttttttttttttttgagttacttactaaataaaaataaaacactatttctcaatagacttgaagcttcaagatttcctggtggacaatgaaaccttctctgggttcctgtatcacaacctctctctcccaaagtctactgtggacaagatgctgagggctgatgtcattctccacaaggtaagctgatgcctccagcttcctcagtagggctgatggcaattacgttgtgcagctactggaaagaaatgaataaacccttgtccttgtaatggtggtgaaggggagggaggtagtttgaatacaacttcacttaattttacttccctattcaggcaggaattgccaaaccatccaggagtggaatatgcaacctggcgtcatgggccagctggttaaaataaaattgatttctggcttatcacttggcatttgtgatgatttcctcctacaagggatacattttaagttgagttaaacttaaaaaatattcacagttctgaggcaataaccgtggttaagggttattgatctggaggagctctgtctaaaaaattgaggacaggagactttagacaagggtgtatttggagacttttaagaattttataaaataagggctggacgcagtggcactgagttgagaactgttgcttgctttgcattaaataggagatcagtccctgcagcttgtgggaataaggctttaaatctctccaattttagctctgtgagatggcactggggaaacagaaatgaacggactagtgtcacaaagctcaggtgggat

SEQ ID NO: 741 - DNA, 4107 bp, Homo sapiens
ccaacttgtaaactcatctttttccgttctttttgtgcctggacttctcagggccctgcaggctgattctagtcccatgttgtgtggtgtttgaagtgtctggtcccttttttcagtgagagaccagctcatccttgggaactgaatgcctcaaactctcttttctttttctctcttccccttctgtttgatgtagtctttcctgtttctggactctgtttcttcatacttcctatctcttaccttcttttcactccttttgtcttccagctgtcctctctcatttttctgcctctctggtcttcaggtagagttttcatctcagctatcttcttgctttttctgatgttggttctttgtttcttcttctcattctgttcaggtccaaaattcatttgggtcaatgttatgtcttagtgttatcttccatttccttctgagcttcaaagccaggctgactgtgcccttccacgccctggccagtgtgaccaggacatcctttccctctggggctgcactggctctttgggggaattgttaccattcagggtcttcaaccctcattctagggacttccagtaacttctcccaccttccctcttctcagtaagacatgggtattgtcttattctgtttctgctgctagaagaaaattctcgagactgagtaatttatacacaatagaaatttacttctcacagttctggaggctgggaaatccaaaatcaaggtgttggcaggtttggtgtctggtgagggctgctctctgcttctaagatggtgccttgttgctgcatccttaggaggggacaaacgccatttcctcaactggcagaagggactgaagcctctccctcaagcccttttataggggtcctcattgtcaggcctctaagcccaagccaagccatcgcatcccctgtgacttgcacatatacgcccagatggcctgaagtaactgaagaatcacaaaagaagtgaaaaggccctgcctcgccttaactgatgacgttccaccattgtgatttgttcctgccccaccttaactgagtgattaaccctgtgaatttccttctcctggctcagaagctcccccactgagcaccttgtgaccccctgcccctgcccaccagagaacaaccccctttgactgtaattttccattaccttcccaaatcctataaaacggccccacccctatctccctttgctgactctcttttcggactcagcccacctgcagccaggtgaaaaaaacagctttattgctcacacaaagcctgtttggtggtctcttcacacagacgcacatgaaactcatggtatctgtgaggggccctaatgctattggtgagggcactgctcacataacttaatcaccccttaaaggccctgcctcttaatactgtcacattggtgatgaagtttcaatgtatgaactttgaggggggacacgttcaaatcatagcaggtgtgctattgccttactagcaaagtaatctgggggaagatgagtaatgtctcgttccacccctgattccagtgctgactgattctggagtggcagagagggttggaggctcaccgctctgctcacccgaccctctggccatctcctcttagaatgcaagggcagggattttgttacacagcgcctcttttgttataggctagctcctgccttcaaggagcactgagaaaaatattatccctttgaaccacaacactagtattttgggtactgtagccattcagaagtttgttgaactaatacaagtttatattatttgtaaaatactagaaggaatgtgtggttcctaaagttatggtattcccattggttgaaagagaagactctggcttcctaatgccttggaaggttcagggagcataagcctaaatatcctggtttctcttgggaattcttcacagcttgtcatctatgactttatccacatttattttgaacatgtttaattttcagcttgtattttctcaaggagtatgtgtgagtcagcattcagagtacttaacacacttagtgtcattagtgataacttaacccacacgtataggaagctagacctccatttacagaaaaatggaggctcagagagcctaactgactttcccaaggccacataactggaaaattctggaactgagttttttcaggtatgtcttggtatccctcggtgagccttctctgtagagaaggaagtgtctcctgggttggaaagcccaggccgggatgaacagcatgggtgtccttaggctgtgtgtaccacacacccctggcctactctcccctgctctaaggagtcacctgaaggagcagctgcatcaccccgcctcaccccttctcctcagcacccaacaaccaggtcttcccagagagtgctcagctattggtgaagcaggcatcgtctattcttcaagaagacagcagagcatcaggaaaacaaaacaccaaaaaaataccataaagacactggagtgtatttgttaccagcccttgtataacagagaagtatttcaaggtcttatttgtaaggctggacaagctcaggctgattaaaaccacgagttagaatttgtctcccgctcccaggccctgctcagttgacagctcctagcaggctgggaggccccaccccacccccaccccaggggtccattgaagaagaccatctgggcctgggatgctgatgtgattttccctacttctccttttttttcatttgcctcctccacccacttctaaagcagctgattgctctggttccttttcatgttgagcaaaagagaagacagatcttgaaacctgagctggggactggagggcactgaccgagagtaaccccgtctggctcagctcagctcagcaaagggctttcctcctccgccttcctgagctgctctccctcctctcctttcctccttctttcccagcctcccccaagctccttcacccctctcttccctctcctccctcctcccaccttccttgtcctctatgctcagagaactgaaggaacactgaatggcctggaaagcaggacctcgcccccaccccgcgtcatacccctccgcctgcacgtgcaaatgtgttcctcagcttggtcccagaggcctggacctgggtcccagaggtcccagctggttccccggcttggtcccagaggcctggatgtgtggcaagaagctgagggttctgcttcgtttcttccagcccacaaacacacatgtcacctgttttttgttctttttcctttcctttgccccactttacagaagctcttggctaattggtaggtcactgtttgctcctccaggcaaaaccaaggaggctgagctcagcaggtcaagtattttggtctgtattgaagagactgtggtgggagagccctcttgaccttctgctggatagtgactttctcttctgctggcagcagtagcccagctccgcatcctgtgacagaggtcataccttccagttacccgagcgaacacttggagcaagtcagctttttcccctgaaacagcacgttcacgttcttgatctttggtttgcacaacaacctgtgaatgttattagccccgttttttttgtttgtttgttttttgagacagagtgtcgctcttgttgcccaggctggattgcaatggcgtgatctcggctcactgcaacctctgcctccaagcaattctcctgcctcagcttcctgagtagctgggattacaggcatgcgccaccacacccggctaattttgtatttttagtagagacggggtttcttcatgttggtcaggctggtctcgaacttccgacctcagttgatccacccgtcttggcctcccaaagtgctgtattagccccattttatatccaaggaaactgaggcttagggagatttaaataggggggaaagtatagcttcatgattacacagtcaggaaatggcagagctgactcttgaattcagaccctgtgatgctgtatccagtgctgattttgttttgccctgtgttcctttcagtgtcaggtaagaagacctcagagatcatcttctccaacccacacattttactgattataaaatccag

SEQ ID NO: 742 - DNA, 4043 bp, Homo sapiens
ggaatgtttttcctccccatttctgcctctcctctggttgtgtttcagtatgtctgtgtgcttcttgaagtttactggaaattatgaaagtattctggcacagaggaggaagggatttttgcctcccttgttctgagtgctacatttccgttaatgcagtctgagattgtattaggcattttggcattcacgtcaccttgttgactcatattccatgtgcactcaaacaaaattgtgattattttaaataggcagaattgcaagttacgtgttctccatttctttgttgtattgttggctttttgaactaaagggaaaaatgtcttttttctgttttacatgtttagattccctatgctatcctatcctcccaaaaccattttagattctgattttgccatgtattatatctgatactcctttctcgtcatctagagatgtgataaacaactctctttggcctcattccagtcatcgataactgtgggacaaagacttgaagcttggatcagtccagtggagactaaccacccctgtagacccttttttcctcaactataaaatagcagctaacttgaaatgtaaactataaaacctaatgtagtatctggcacatagtagattcccaataaatgagagccagtattcttctaagacagtgatgcatttctgagcacctggccttgttcttctgccttgcaatttatgcagcagttgaaatagactggctgatgggggtaagttgtcaagcagactttctgatcttagtggaggagactgccttaaaacaccactaatttcctttttcttttcttttctttcttttttttttttaagacagagcctcgctctgtcaccaggctggagtgcagtggcgcaatcttggctcactgcagcctctgcctcctgggttcaagtgattcttgattctgtagacactaccactcaggcctatattgtaatcagtgctgggccactgggctcctgcttctgtgatccagttgggaagtttatcttgttcttcccttcagcttgcatctgctaaattcgctggactatacacaggtgatttgtagatatggggatctctactcaaatactctcatgatttccttggctagagcatcattttatttccacttattggaagagaccttagagaccagttagttcatttatagataaattagttgattctgtcattcaacccttatatattgagcgtctcctatatgcgaatcactgttctaagtgccgagacacagaggtgtccaaaacaaatatggcccctctccatatggaatttctattctagagaagaatctgacccagaagggggaagtgactgtcccaagtctacacaaccacagaagggatattctgggaataaatcacggctaaacccccctgctgctccaggcagttctccttctacagtgctctattgtgctgttttaataatctttcaactgggaagaactcccatttcaggaattaagccgtggacaaatcttttaattatccttgaaatcatcctaataagaaatccaaggaggaagtcttacagggtgcctcacccacttttctcatcactggaactttttagacattttattattttcttcctaaaccagagtacaggcacacaagttgagtggtgtggtggctaaattaattaatgtttgcaaggcagtgtgagaagcattcattcatcttaaatacctatggtgactgcaactcagatgtaaaaattggataaatcctcagaaaccctagggaaagtgacatgtctgtattttgtctctgtgagatacagactggcagagataagtgtttctctgggtgagttttgtgtggtatctgggatgattttaggcagtacgtggatgagaacttttaattttaacccacatccaattgcaatttcatggaaattattgcttaggaggatgttcaacaggaaaaatataattaaagttaattcaaaagaaacattttctgtgaatatggtaaaacttgtgagagtagtttgtaaatgattgaagattggaaaacattggtataagagtgagtgtggggttttgtattaagattcattttgggaagaaatccatgctgcatccctcatgaagtgtgaactttgggcatgtgttgattctttctggcccagagtttacctgaagattagctgccctgagggtcactgagcattaaattagatgatgtctgtggatgactgatagtgaagctcatagcccacagttgacacataataaattcgagttgctttgcttccccttctgttcctggctgactgtttggcctttgccacttgttcggcctctctgggccttaagtttctttgccttgaaattggaactttctttggtgaaacaaccagaaaatgcttcagcccagaaacttggtcagtacttggatgggggatcacctgggactacccaaggatgtgggctgtctgctagactatagccccttgagggcaaggtgggcgccttgctcatggttccatcctaagccccagcacagtagtgggtgcatggtgagccattagtgaatctttgtggaatgaaggtgggagaaaataaaatacctgtacttcacagggtattgtgagggtcaagtaaaagtgctttaaaaaattgtattatatagtttattcccttgtgttagcccaggtcaacagagcctacgaataataatgatgacagaagttcttcaaaaagtcttggccttctttctttcacaaaattgccccccagagctttctggaagggcagccatgaacccagaggcctaaagtagatttactgggaagctaaaaatatttactttatttttcatagctcctttcaaggtcctctctgggggtcttagcaatatgtttacacagtggtatgtttttgtaaggtttgcaaaagtaagattttttaaaaatactatcttgttttaaaaagagagccccctaccaacttgtgtcagcctcaggcccccacctgcatctgctcctgccagggcatggtggggcaagaagcactgctccccttccaaagcttccttccttgccctggagtcatcctcactccccactccaagccacctgccatcgctgtgccccctctctggtgaatctggcattcttaggtgggctgagaagcagactggcccaagctaaggcctttctgatggggttgttgctgctgagaatcatgactgggtgggagaaggaggtgaccctttgctgtcttatttttactgtgtatttccttttcagctacttaaaatgtattgcttagtgatacctaatgggttcattagcctgcttcctactgaacatttccgctcaggcatccacttggtcccaaggcctgctcctctcccatattctgaaatctggactacagactctcattcaactccaggttgcactgtggacacagtcccctcttgagcaggtacctccttgcagtggttgggacgtcctacttggctcatagttgggaagtgcatatgctggagctgaagcctcttgccttcccgggatagggcgtcctcacatcccctctgagaagttccccagcttccctctgttccccgtttccacacttagcgaggctcttgtccactgctacatcccccatagccagtccctcagccttgccattgcttatgctggtctggaaacaattcctagacttgtggggcatctggggaagttctccatctttttttagctggcatgacccaagtggtgtgggcagggctgtggattctatggtgtggctggaagccaggtagcctctctctactgtacatggaactcagcaacttctgagtcaagcaagatcttagctctgcaggtgtcttgccctgtccaaagttatggccacaccagtaccttttaactctagaagcccagtaagtgttttgtgggaccgcaaagatcattttctagacctgctgaatatgcctagaacgggtagggatggctttcacgctgttcctagggctgacaagtcacacgt

SEQ ID NO: 743 - DNA, 4046 bp, Homo sapiens
tggacaagtgatttaagtttcttttaaacagagaatagtaatacctacctcatattattattgtcagtgtatcatcttacaatcacagtctttctcttagggctgggctcagtgggtggattgacactgcagaaatggccagatctaaaggatcaacatttacgtagctgggaaatgtagctgggacttcagtttcactgccctagtgatttttcctaccactaagcagctcagtccatacccctacgagacccacaagcttatgagatactgttcttccaggaaagcagtggggccagggccaccttttaattgtgtttcttggcctggtcccatctttctcacaatatatagcaacagttatttacttgctgattttctaatgcacatcacacatagtcatattaaacacacacacacacacacacacacacacacacccctcaagaaacattttctgagacgtgatttcctgatttcatcaaaaaagaaaagagcgggccaggcacagtgggaagtcaaggtgggtggatcacttgaggtcaggagtttgaaaccagcctggccaacacggtggaacctcgtctctactaaaaatacaaaaattagccaggcgtggtggcgcacacctgtaatcccagctactggggaggctgaggcaggagaattgcttcaacctgcgaggctgaggttgcagtgagccgagattgcgccattgcactccagcctgggcaacagagtgagactctgtctcaaaaaaaaaaaaaaaaaaaaaagcataaactgaaatttatatgcaatttatatgcctgtgagataattctgttttctcttttggaaccccaaagagatttttttgattgatgagcaaatacattttagattttatttaagcattatgccaagcaccactgaagtataagtttcaagggcaaactcagttttttcatctactagacgaatgattttctggaatgattacaagcaggcaagatggtgtagtggaaatagcaaatgtcttcggcatcagacaagttggggtttgtttgtatcctgcctctgcccttcaccgaggttgtgatcttgggcagattgttgagttttaacctagattcctctgactccagatcataaattttcagaaaagttctgaaattcttgtatatactgatggtaaatgagacttttccttacatctatgcacttctttgtttgtttgttttgagatggtcttgctctgttgcccagactggagtgcagtagtgcaatctccgctcactacaatgtctgcctcccaggttccagtgagcctcctgcctcagcctcccaaatagctgagactacaggcatgtgccaccacgtccggctaatttttgtatttttagtagagacagggttttgccatgttgaccacactggtctcgaactcctggcctcaggtgattcgcccgcctcagcctcccaaagtgctgggattacaggcatgagccaccatgcccggccatatccatgcacttcttgcaaccttaccttcttttctcatcaccctccagggacctagttggaagagcagagttaaaagttaaggtgaaacttggagaggtgtcttgtccctaggaacaaaggactggtttgaaattctctgtaaatcttccccagttcaaaccagagttatcaaggtcttaaaaacttccctgggtcctgagagcccattatattatttacttgtcttcctgtacacccactgcctagtcctgatcctacttttgtttgcaaataggatggggcacaacgtacaaggaagggcctttgccacccctgctaagggataacctgaaataccttcaccatcactgccctgtgctgcttttcacctatgccagtctgtctacagtgccagtgtctcctggcattgaaaggggagaatcttttggtcctttgagtatttggttgggttacataaatctccctgaatgaagagcagctgacttaggcaaggggccttgtttggttttccttgaactattaacaggaagatagggagattaactgtgtaaatgttcaataggccagagtccctgcagagggtggccacagtgatcagatcttatcacatccttgctttgggtgttgcctctctggttggagtatggatagaaaagaaagaaagaccctatattgaaatgcaaagtgcagcaagtcctgactttggattaacttctcagcccatttgcatgaaaataaaaagatgaataaaacaaggttcccactttggagggaggtggtagctgtgagatggaaggagtgttcctgctgggcaacagcagagtaagtgctggggtagattcactcccacagtgcctggaaaatcctcataggctcatttgttgagtctttgtcctacaccaggcactctgcaaaaacgctttgcctgcaaggtctcatgcgatgctcaccacagctctgtgaagttaattgtacttttatcaccattttacagatgagaaaactgagggtatggggtcaatgacttggctaaagtcactgcttagcaagctgcagggactggatgtgaattccaattggtttgactccaaagcctgtgaagctacttgttcttcaccacctagagctgtggttcttgataactgtgaactcttttggggtcacaaatagccctgagaatatgatagaagcaggagctctggcctttctgtccatacctgaacaggtccttgggttaagagcccctcgtccagggcctattaatcttgatcctcataagcagcatccatgtattacggccgcaaaccaaactgtgccagaccgaatcctaggaccaagcccaaatatgtcccatcatccttttggtaagaagctcattgtaagaaagaaagaggagagcaagaggatgacctagtgcatggggcctcattgttttaattagtgacaaaacaacaataataacaacaaaacccccgaagcttcacagatgacatcagaccccaagcctgtgtgtttttcaggtgcccttgaggagctttgtagctggcagaggaggtgaaactgacaaatgtttggcagatggaggagagtaccagaggggtttgagatgagctaaattccaatctaaccgcaggtgtgaggaagaggcttggattgggaccatggagatgggggttctactcccagtcacgccagctgactttgcgagtgttctttgtcagtcactttatcttattttatttatttttatttttttgaaatggagtttcgctcttgtcgcccaggctggagtgaaatggcgcgatcttggctcactgcaacctccccctcctgagttcaagcgattctcctgcctcagcctccagagtacctgggattacaggcgcctgccaccaagcccatcgaatttttgtatgcttagtagagacagggtttcgccatgttggccagggtggtcttgaactcctgacctcaggtgatccgcccaccttggcctcccaaagtgctgggattacaggcgcgagccactgtgcccagcccacttcatcttaccgtagttacctccttagagtatgaaaaaataggcttagggcatccccaagtcccctctatgtctgagagctgaggctggctgtcaaagaggaactaaggatgccagggactttctgcttaggacccctctcatcacttctccaacgctggtatcatgaaccccattctacagatgatgtccactagattaagaatggcatgtgaggccaagtttccacctgagagtcagttttattcagaagagacaggtctctgggatgtggggaatgggacggacagacttggcatgaagcattgtataaatggagcctcaaaatcgcttcagggaattaatgtttctccctgtgtttttctactcctcgatttcaacaggccattttccaaataaagccatgccctctgcaggaacacttccttgggttcaggggattatctgtaatgccaacaacccctgtttccgttacccgactcctggggaggctcccgga

SEQ ID NO: 744 - DNA, 4045 bp, Homo sapiens
ccaggctggtctccaactcctgacctcaggtgatccgcctgccttggcctcacaaagtgattacaggcatgagccactgcatccatcgccaaaaagattttttaaaagagtttaatgtagaaccatatcaaaggtctttggaaataaaaaacagttttttaaaaatatcagaaataaaacaacaaataaataaataaataaaaacacccaaaacaatctgaagcacgagcacctagcagaaaggttcaattatgatctattcatagagtggaatatcaagtagacattacaggacatgttttaagattatattttatgtcatgggaaatgctctcccagtatgatgttaaatgaaaaaacagaatacaaaagtatatatgctgcatagtctcaatattgtagagaaaaaatattatttatgtatgcatgaaaaaagacaaaagatgttaacagagatccattgttacttcagtttactagggattgtctctgggaggtaggattaaggtgatttatatttacctttttaaacttttctgtatttttttattttcaaattttccataaaaatataaggacttgaagatcaagaaaaaatttctgctttggctcagtgcagtggctcacgcctgtaatcccagcagtttgggagccctaggggagaggatcacttgaacccaagagtttgacgttccagtgagctatgatctccggatcgtaccgcctggacgatggagcaagaccctgtctcaaaaaaaaaaatctttgctttttttttttgtttgtttttgagacggagtctctctctgttgccccagctggagtacagtggcacaatctcagctcaccgcaacctctgcctcctgggttcaagcgattctcttgcctcagcctcccaagtacctgggattccatgcacccaccactatgcccagctacttttttgtattttcagtagagacagggtttcaccatgttggccaggctggtctcgaattcctgacctcagctgatccaccggccttggcctcccaaagtgctgggattacaggcatgagccactgtgcccagcccaatcttttgctttttttaaaaaaagaagacaaaaagggattttataccagtattatcttggctgtgtgactctgaagccacagttgtaagttataattactctgaaacacaaggccctgtgactcttttgggctctttggtgtttatcttgattacaacgttggaatatagaaatgaaaggaatgggagaggtgatagacttcaggcagtgtaactagttgtctgaacactactggctcaattatattgtgtctagtgatttccatcttgtccgtctgctaatttatcgcctggtaactcactgaggcagggttttcctttggagaaacctcattgttttaaccagtgtatcatgcttgtttagaagttcaatgatctttttaactcatcggagaagatgatgaccagacctggacagatggggaaggactttgcactctctctttacagtcctgagtgcacacaggtcaatatggaactatgtgtgaattttcattgtctttgagagccctcttctctgccccatagggagcagctttgtgtgcaattagaggagcaagggttgtgtgtatttagcacagcaggttggcctggtcctctcctctcaacatagtcaccacatacctggcactatgctaaggctgggaatgcagacagatgggtgcctgctttcagagtgctcaatgtgctgaggaagccagcaacagaaacagatgatttcaggagctccaggaaaatgctacaggaggagtgtgcctgggttactggagtagcacaggaggagggcttctagctcaggctgagattttagtaaaggaaattatgccacgatgaatcctgaagaatgaatagaagtgaaccagataaagcacgataggaagcatcttcccttacctaagggaagacacagaggtatatggaatggtatgttaaaaggttgggactccaaacagttctgttaaagcttagagagtggtgggagagactggagaagttgattaattagtaaatgaagttgtctgtggatttcccagatcccagtggcattggatatccatattatttttaaatttacagtgttctatcttatttcccactcagtgtcagctgctgctggaagtggcctggcctctatttatcttcctgatcctgatctctgttcggctgagctacccaccctatgaacaacatgaatgtaagtaactgtggatgttgcctgagactcaccaatggcagggaaaatccaggcaattaacgtgggctaaattggacttttccaaagatgctgtctttgggaaacatcacacatgctttggatcagaaaacctaggcttctaatttgttgataaggcatgaactcaggagactgttttcagtcctagtgaatggtgataattgtaattataacagtagacaacatctcttttacacattttaaatcatgaaaatagaataaccttactgataattttagaaagtggtgattaaaagcacatttaagataatgccttaacacctagtcttttccatatgcatgatgtcttaatcacacattgcaaatcatggaacacagaattttaagcagcatttgtgtagaacttctcagttttactaatattattttattttattctcataacaaccttgaatagaactcagatcatctgtcaatcatgtattttgataacagcctttacagtgagcatagaaaatacagtagtggctaacaacacaggctccagatgtcaggttatctgggtatgaattctggtgtcagcattcactaagcatatgaccttggacaagtgatttaagtttcttttaaacagagaatagtaatacctacctcatattattattgtcagtgtatcatcttacaatcacagtctttctcttagggctgggctcagtgggtggattgacactgcagaaatggccagatctaaaggatcaacatttacgtagctgggaaatgtagctgggacttcagtttcactgccctagtgatttttcctaccactaagcagctcagtccatacccctacgagacccacaagcttatgagatactgttcttccaggaaagcagtggggccagggccaccttttaattgtgtttcttggcctggtcccatctttctcacaatatatagcaacagttatttacttgctgattttctaatgcacatcacacatagtcatattaaacacacacacacacacacacacacacacacacccctcaagaaacattttctgagacgtgatttcctgatttcatcaaaaaagaaaagagcgggccaggcacagtgggaagtcaaggtgggtggatcacttgaggtcaggagtttgaaaccagcctggccaacacggtggaacctcgtctctactaaaaatacaaaaattagccaggcgtggtggcgcacacctgtaatcccagctactggggaggctgaggcaggagaattgcttcaacctgcgaggctgaggttgcagtgagccgagattgcgccattgcactccagcctgggcaacagagtgagactctgtctcaaaaaaaaaaaaaaaaaaaaaagcataaactgaaatttatatgcaatttatatgcctgtgagataattctgttttctcttttggaaccccaaagagatttttttgattgatgagcaaatacattttagattttatttaagcattatgccaagcaccactgaagtataagtttcaagggcaaactcagttttttcatctactagacgaatgattttctggaatgattacaagcaggcaagatggtgtagtggaaatagcaaatgtcttcggcatcagacaagttggggtttgtttgtatcctgcctctgcccttcaccgaggttgtgatcttgggcagattgttgagttttaacctagattcctctgactccagatcataaattttcagaaaagttctgaaattcttgtatatactgatg

SEQ ID NO: 745 - DNA, 4046 bp, Homo sapiens
gcagtggcgtgatcatgcagtgatctcggctcactgcaacctaggccttctgggttcgagtgattctcctgccttagcctcctgggttcaagtgattctcttgccttggcctcccaagtagctgggattacaggcatacacccccatgcccatctaatttttgtatttttagtagacacagcgtttcactaaaattttgtatttttagtagagatggggtttcaccatgttggccaggctggtctccaactcctgacctcaggtgatccgcctgccttggcctcacaaagtgattacaggcatgagccactgcatccatcgccaaaaagattttttaaaagagtttaatgtagaaccatatcaaaggtctttggaaataaaaaacagttttttaaaaatatcagaaataaaacaacaaataaataaataaataaaaacacccaaaacaatctgaagcacgagcacctagcagaaaggttcaattatgatctattcatagagtggaatatcaagtagacattacaggacatgttttaagattatattttatgtcatgggaaatgctctcccagtatgatgttaaatgaaaaaacagaatacaaaagtatatatgctgcatagtctcaatattgtagagaaaaaatattatttatgtatgcatgaaaaaagacaaaagatgttaacagagatccattgttacttcagtttactagggattgtctctgggaggtaggattaaggtgatttatatttacctttttaaacttttctgtatttttttattttcaaattttccataaaaatataaggacttgaagatcaagaaaaaatttctgctttggctcagtgcagtggctcacgcctgtaatcccagcagtttgggagccctaggggagaggatcacttgaacccaagagtttgacgttccagtgagctatgatctccggatcgtaccgcctggacgatggagcaagaccctgtctcaaaaaaaaaaatctttgctttttttttttgtttgtttttgagacggagtctctctctgttgccccagctggagtacagtggcacaatctcagctcaccgcaacctctgcctcctgggttcaagcgattctcttgcctcagcctcccaagtacctgggattccatgcacccaccactatgcccagctacttttttgtattttcagtagagacagggtttcaccatgttggccaggctggtctcgaattcctgacctcagctgatccaccggccttggcctcccaaagtgctgggattacaggcatgagccactgtgcccagcccaatcttttgctttttttaaaaaaagaagacaaaaagggattttataccagtattatcttggctgtgtgactctgaagccacagttgtaagttataattactctgaaacacaaggccctgtgactcttttgggctctttggtgtttatcttgattacaacgttggaatatagaaatgaaaggaatgggagaggtgatagacttcaggcagtgtaactagttgtctgaacactactggctcaattatattgtgtctagtgatttccatcttgtccgtctgctaatttatcgcctggtaactcactgaggcagggttttcctttggagaaacctcattgttttaaccagtgtatcatgcttgtttagaagttcaatgatctttttaactcatcggagaagatgatgaccagacctggacagatggggaaggactttgcactctctctttacagtcctgagtgcacacaggtcaatatggaactatgtgtgaattttcattgtctttgagagccctcttctctgccccatagggagcagctttgtgtgcaattagaggagcaagggttgtgtgtatttagcacagcaggttggcctggtcctctcctctcaacatagtcaccacatacctggcactatgctaaggctgggaatgcagacagatgggtgcctgctttcagagtgctcaatgtgctgaggaagccagcaacagaaacagatgatttcaggagctccaggaaaatgctacaggaggagtgtgcctgggttactggagtagcacaggaggagggcttctagctcaggctgagattttagtaaaggaaattatgccacgatgaatcctgaagaatgaatagaagtgaaccagataaagcacgataggaagcatcttcccttacctaagggaagacacagaggtatatggaatggtatgttaaaaggttgggactccaaacagttctgttaaagcttagagagtggtgggagagactggagaagttgattaattagtaaatgaagttgtctgtggatttcccagatcccagtggcattggatatccatattatttttaaatttacagtgttctatcttatttcccactcagtgtcagctgctgctggaagtggcctggcctctatttatcttcctgatcctgatctctgttcggctgagctacccaccctatgaacaacatgaatgtaagtaactgtggatgttgcctgagactcaccaatggcagggaaaatccaggcaattaacgtgggctaaattggacttttccaaagatgctgtctttgggaaacatcacacatgctttggatcagaaaacctaggcttctaatttgttgataaggcatgaactcaggagactgttttcagtcctagtgaatggtgataattgtaattataacagtagacaacatctcttttacacattttaaatcatgaaaatagaataaccttactgataattttagaaagtggtgattaaaagcacatttaagataatgccttaacacctagtcttttccatatgcatgatgtcttaatcacacattgcaaatcatggaacacagaattttaagcagcatttgtgtagaacttctcagttttactaatattattttattttattctcataacaaccttgaatagaactcagatcatctgtcaatcatgtattttgataacagcctttacagtgagcatagaaaatacagtagtggctaacaacacaggctccagatgtcaggttatctgggtatgaattctggtgtcagcattcactaagcatatgaccttggacaagtgatttaagtttcttttaaacagagaatagtaatacctacctcatattattattgtcagtgtatcatcttacaatcacagtctttctcttagggctgggctcagtgggtggattgacactgcagaaatggccagatctaaaggatcaacatttacgtagctgggaaatgtagctgggacttcagtttcactgccctagtgatttttcctaccactaagcagctcagtccatacccctacgagacccacaagcttatgagatactgttcttccaggaaagcagtggggccagggccaccttttaattgtgtttcttggcctggtcccatctttctcacaatatatagcaacagttatttacttgctgattttctaatgcacatcacacatagtcatattaaacacacacacacacacacacacacacacacacccctcaagaaacattttctgagacgtgatttcctgatttcatcaaaaaagaaaagagcgggccaggcacagtgggaagtcaaggtgggtggatcacttgaggtcaggagtttgaaaccagcctggccaacacggtggaacctcgtctctactaaaaatacaaaaattagccaggcgtggtggcgcacacctgtaatcccagctactggggaggctgaggcaggagaattgcttcaacctgcgaggctgaggttgcagtgagccgagattgcgccattgcactccagcctgggcaacagagtgagactctgtctcaaaaaaaaaaaaaaaaaaaaaagcataaactgaaatttatatgcaatttatatgcctgtgagataattctgttttctcttttggaaccccaaagagatttttttgattgatgagcaaatacattttagattttatttaagcattatgccaagcaccactgaagtataagtttcaagggcaaactcag

SEQ ID NO: 746 - DNA, 4050 bp, Homo sapiens
taattggattgtttgatgattaaatgagttaatgtgtataaagcactcacaaccctggtacatagtaagacctttcattattattatcatcatcaattttttttaacctcttttcctgatctgcttacactcaccagcttcagctgctccaaatggcttgtaagattttttgtttgccctttgctgtcagttgccatggggaagatccattcatttttttcagtcaaccaacatattttgagcatctgctgccctacaggatcctagatatgggggctgcagagatatccaggaacataagccttgattaattgggtcagatcagtgctcagcagggctggcaagtgctaggtttcttttaagtggcatatcttaaaaggtatatgtcctaaacatagctttgtgatggcagcatgatgggtacaaaagcacacacttaagtgtcagtagatctgggttcaaacattggtgcagtttcttatggctcgtaacttgttcaaacctcagtttcttcacttctaaaacggtaatgatacaacctacctcacagggttattatgaattaaatactggagatgagatacacaaaacgtcttgagtacacagtagctgcccaatattggctgtaagtattataaatctacaagctgtgaattaattttacctctctggatcctgttgatatttctagaccattccacctagtggggccatttcctacctgagtcacccgtggtgtcaaatagaatgtcatgtggcctcctgagttgggtagaattggctgctcatctcaaccccgctactgactatctctgtgatttacccttcctccagccttagccttgctacatataaaatcaagacaataatgtttcctatctcacagggttgtcctgaggattaaattaagtaattaatataaaatgtgccttgtacatattgggccctaaataaacagtagctactatttatccttaaagtacaaatggtagtttcagagcttcaaggctgatggctatttatcttactcatactctttgtttagcttcatttttttcccctaatttcattagtattttcttttctttttttttttttttttttttttttttttttgaggtgaagtctcactctgttgcccaggctggagtgcaatggagcgatcttggctcaccccaacctctgtctcctgggttcaaacagttctcctgcctcagcctcccgagtagctgggattacaggctcccgccaccatgcccagctatttttttgtattttcagtagagatggggtttcacccttttgaccaggctggtcttgaactcctgacctcatgatcaacccacctcagcctcccaaagtgctgggattacaggtgtgagccaccacgcccggcctcataagtattttctaaatttatttacagtcatgccatttaaaaggaaagttgtattcctgtctttgttaatatttataagtgattttattcagctacaagcttggaatggcatataattttgtattctgcttttttcacttaatattacatggctaatgatttctgtgtttcataaacattattctgatgatggcatgatatattgttgagtacatgtaccataattgaatcatttccctattgctatgcaattaagttgtttccaatattttgcaattataatgtttcaatgaatgaataactttatgcatatagctttttgatatcttaagttcagtttcctaggatgaatttccaggaatagtaattgggcaaatgggataaacatgactcttgaatacgtattgttaacattgctttcccaaagggctcaactgatttatatttccgtgttcattatcttttaaaccagctcatttactcaccaaacatttttaaagccattatcatgtggtaggcttagtaagaagaaagtgaccctaagggagaagcttatatataaatagggtccctggtgtaccaagtgctgatacagacacaaagtacctggggaaattgagatgagggagtcctggctcagctgggagaaaagttcattttcatagagtcatggttttgttctttggcagaaagaaaattgctttcttccccacccccacccccagctttattgaggtataattgacaaataaaaattgtatatctttaagatatgcaatgtgatatatatgtatatctcaacttaaaaaataagctacagaataaaaaggtgtttgctattaaaaaaaaagaaaaggctgaatgtcattcccaagcttggaaatttgagtatgttgcctctttgggattatttacagaaatattagcaagaccagccccatctttggtcttgagtactccactgtcagcatgctttcttccagagagggatccatttgcctttatttttcattctgttgtgccgtctatgcaaactattcttgatagttttatggtaacagtgtttttttgttccatgagataatttatacatgctcattgtggaaaatttagaaaagacaggaaagtattaaaaacatcacttttttttttttttttttttttttttttttaagagacagagtcttgctctgtcgcccaggccggagtgcagtggcgtgatctcagctcacagcaacctccgcttcccaggtttaagtgattctcctgcctcagcctcccaagtagctgggagtacaggcatgcaccaccacgcccggctaattttgtatttttagtagagatggggtttcaccatgttggccaggctggtctcaaactcctgacctcaggtgatccgcctgccttggcctcgcaaagttctgggattataggcaggagccactgcgccagccacacctacgttcttatcatcctagtacatccactgtcattatcttgctgtatttccttctgcccagtctcactctgatcatgcagtggcgtgatcatgcagtgatctcggctcactgcaacctaggccttctgggttcgagtgattctcctgccttagcctcctgggttcaagtgattctcttgccttggcctcccaagtagctgggattacaggcatacacccccatgcccatctaatttttgtatttttagtagacacagcgtttcactaaaattttgtatttttagtagagatggggtttcaccatgttggccaggctggtctccaactcctgacctcaggtgatccgcctgccttggcctcacaaagtgattacaggcatgagccactgcatccatcgccaaaaagattttttaaaagagtttaatgtagaaccatatcaaaggtctttggaaataaaaaacagttttttaaaaatatcagaaataaaacaacaaataaataaataaataaaaacacccaaaacaatctgaagcacgagcacctagcagaaaggttcaattatgatctattcatagagtggaatatcaagtagacattacaggacatgttttaagattatattttatgtcatgggaaatgctctcccagtatgatgttaaatgaaaaaacagaatacaaaagtatatatgctgcatagtctcaatattgtagagaaaaaatattatttatgtatgcatgaaaaaagacaaaagatgttaacagagatccattgttacttcagtttactagggattgtctctgggaggtaggattaaggtgatttatatttacctttttaaacttttctgtatttttttattttcaaattttccataaaaatataaggacttgaagatcaagaaaaaatttctgctttggctcagtgcagtggctcacgcctgtaatcccagcagtttgggagccctaggggagaggatcacttgaacccaagagtttgacgttccagtgagctatgatctccggatcgtaccgcctggacgatggagcaagaccctgtctcaaaaaaaaaaatctttgctttttttttttgtttgtttttgagacggagtctctctctgttgccccagctggagtacagtggcacaatctcagctcaccgcaacctctgcctcctgggttcaagcgattctct

SEQ ID NO: 747 - DNA, 4023 bp, Homo sapiens
gcctctcagaatatcttttgatatttttatctgttttttccccattgaatgttattaccttatcaagctcaaaaaagtaccctatcgctattttaagttcagttgtgttaaatctataaattagcttgggaaatttggatattaaatgaactcatgaagaagcagagtttagctctccttaattctcatcttcctttatttatcctactacagttctgtggttttcttttatgtaagaagcacatgtttggctaagttaatgcctaggtttttttgtttatgtgtccattctcactgtggatagtattctcttttccccacattatattaatttaactggttttcagagactaatagcaatgctattatttaggagaatttaccttggttctgattaacttacccatacttgcaaatcatttgcagctttttagttaactttgtgagttctcttagatttacgaccatgccagaaacagaaaggatattttcatctcttcctttctgatgtttattcttcttgtttcctttttttatcccccattatattctcaagaatctctcaatactaagaaatagcgacttcatttttcagcgcggagtgcattattttggctaccatgattcagaagcctcttgcctaaggcccaattttattctgctagttttctctgttctttgtacatggcccttgcgctgccctaaccttgaattaacgtggctaaatctcaagaatttaagagcaccgtgactgtgtcctcaggctagggagggaaatgggttcacagagtgactggattgtggtctatgaacttcggcagccagcagcaaaagtcaggcatgaataatcaagtggacagtgaacatctgtagtgtgggagatgttggcataactatgaatgatgattcaagagtggtttgatgcatattgaataacatgatgataagtactagactctgtgctaagccttctatgtgaaatacatttaattctcataataactctagagcagtggttctcgaccggggccggttatccccctaccccaccccaccctcacccttccaccagggacataacatctggagatatttttggttgtcacaatcctgggaatgtatgtgctgatatttagaggttgaggtcagggatgctgctgaacttcgtagaattcataggagagtctctcacaacacctatctggccccaaatgtcagtagggtcactatcaagaaaatctgctctagcagtgcctgctcatattatccccatgttgaaatagcaagatgggaagtgcaaagtggtgcttcggtactcttggagcagctttgactttggtgagaaacgccttttaaaaacaatgtttcttcccatcttcccaccccatggggaggtgtggggttgggtgggtaggcaccaaagcaagatttagaagagttttctgtaggaatttataatggtaaaggatcaacttcatttccaagctatttatgagggtttatgtttaggaaaagtgctaagcttagagaaggaggagaaatctgattttattaatgagtgtagccataatggcatatcctggcagaagtcaactttggtttctagagggaggctattatgaaaagaaatacctggaacattcccctgggtttggaaggtgagttctaggttcaatgatgggaagaattttagaggtccaagataaaagggcaaagattaaattttgtctctcatgagttctctggctcaggtggtgtgaactttgcagacagtctctttaattcactcatacatgctagtctcccagctcagcaagggctttgagagagcaggtgtctgtatgctctggtaagtgaaggcaaagtgcataaggaggttggggtccataatggcgaagagaaggagcccttcagtcagagtggctttgaatcttggctctgccatttgccaatcttggaccattgggcagtgtattaactctttgaatctcagcttcctcttctgtaaaatgtgtataacaagagtactaattggattgtttgatgattaaatgagttaatgtgtataaagcactcacaaccctggtacatagtaagacctttcattattattatcatcatcaattttttttaacctcttttcctgatctgcttacactcaccagcttcagctgctccaaatggcttgtaagattttttgtttgccctttgctgtcagttgccatggggaagatccattcatttttttcagtcaaccaacatattttgagcatctgctgccctacaggatcctagatatgggggctgcagagatatccaggaacataagccttgattaattgggtcagatcagtgctcagcagggctggcaagtgctaggtttcttttaagtggcatatcttaaaaggtatatgtcctaaacatagctttgtgatggcagcatgatgggtacaaaagcacacacttaagtgtcagtagatctgggttcaaacattggtgcagtttcttatggctcgtaacttgttcaaacctcagtttcttcacttctaaaacggtaatgatacaacctacctcacagggttattatgaattaaatactggagatgagatacacaaaacgtcttgagtacacagtagctgcccaatattggctgtaagtattataaatctacaagctgtgaattaattttacctctctggatcctgttgatatttctagaccattccacctagtggggccatttcctacctgagtcacccgtggtgtcaaatagaatgtcatgtggcctcctgagttgggtagaattggctgctcatctcaaccccgctactgactatctctgtgatttacccttcctccagccttagccttgctacatataaaatcaagacaataatgtttcctatctcacagggttgtcctgaggattaaattaagtaattaatataaaatgtgccttgtacatattgggccctaaataaacagtagctactatttatccttaaagtacaaatggtagtttcagagcttcaaggctgatggctatttatcttactcatactctttgtttagcttcatttttttcccctaatttcattagtattttcttttctttttttttttttttttttttttttttttttgaggtgaagtctcactctgttgcccaggctggagtgcaatggagcgatcttggctcaccccaacctctgtctcctgggttcaaacagttctcctgcctcagcctcccgagtagctgggattacaggctcccgccaccatgcccagctatttttttgtattttcagtagagatggggtttcacccttttgaccaggctggtcttgaactcctgacctcatgatcaacccacctcagcctcccaaagtgctgggattacaggtgtgagccaccacgcccggcctcataagtattttctaaatttatttacagtcatgccatttaaaaggaaagttgtattcctgtctttgttaatatttataagtgattttattcagctacaagcttggaatggcatataattttgtattctgcttttttcacttaatattacatggctaatgatttctgtgtttcataaacattattctgatgatggcatgatatattgttgagtacatgtaccataattgaatcatttccctattgctatgcaattaagttgtttccaatattttgcaattataatgtttcaatgaatgaataactttatgcatatagctttttgatatcttaagttcagtttcctaggatgaatttccaggaatagtaattgggcaaatgggataaacatgactcttgaatacgtattgttaacattgctttcccaaagggctcaactgatttatatttccgtgttcattatcttttaaaccagctcatttactcaccaaacatttttaaagccattatcatgtggtaggcttagtaagaagaaagtgaccctaagggagaagcttatatataaatagggtccctggtgtaccaagtgctgatacaga

SEQ ID NO: 748 - DNA, 4038 bp, Homo sapiens
ggcctggaggaatataataactgagacttgttttatttctgcagagggttctaagccattcacttcccagatgggccaataatgctttgagtaatctggagatcatctttaatgcgcaggtgaatggaactcttccacagagggatgtgagggctgtagagcagagtgaactccctgaaactcagacgtcagctctttgtctctctatctctgaacacccttccttagagatcccatctctaggatgcatttctctgtagttagtttctaagtctcttgttcctgttctgcctttatttttttttcctggattctaagccagtatccccacttggctgtcttaatgtagcttaacatgtctgtaatcaaaatgatcatctttctgagattcaaagggctataagggactttggagagaatttcattcagttttcctcaaactagaataatgcttgcactgtctgtaaaagaacaaaagtgtcaaagcatccttttgttcactaaatttccttttttattatagtgttacttaaatattaggaagtaaaagtaggtataaacttcttataggctgttattatacaactatatgacccatacatatttacaaattaagtgcagccaaaattgcaaaatcaataccattcaaattaataccttaaatgtggtgaggcagctgttgttcaactgaaaccaaattataagttgcatggcagtaaatgctatcatgctgatcattttgagtttggccagtctatattatcatgtgctaatgattgaattctccacccatttttctacttgtatgaccttaatttgatggcacctgttccatcctcatgagtttgctacaattatactggtgccaacacaatcataaacacaaatataaacttgggctttgaaatcttgtgccagaacttggctttaaagtaagcatttaaaaaatccatatgtgtttattagactttgtttagatgactgttgaaatgaaaacaaagtgtttaaaatcctcttagagaacttaaatataatccctcagcaatatgtatacagatcttcctttgagaaaaactgattgtgttcagcctctcatgttacaaatggggaacctgaattctgaggtctctagtgagagaacagggactggaatctgtggatcctatctgttttaataataattgtaaagtataatagataatattatattaataaaataaaagcaaacacttagaatgagcttccatgtgtgaggcactaactgattaggcattattaactagatttattccttttaaggccccgcgatgtactgttatttccacatgttgtagctggggaacgtgctactcagagaggttaagtaacttgtctgaggtccacaccactaacaaggagcacaggtagggttcaaatccagataatctgactttggagctggcactctaactcaatgtgcctaatcgcttttcagtggtgtcattattttgcctattctccatctgagaatattgaagtttctgactccttccttgcctttctccctgcctcccgtggttatccccaggtcttggtgttccagtcctctatgtccgtccttactcttattcctttgctacagtgtgatccagggctcctgccccttcttatcctggtagagggggcccacttgctgggaaattgtctccgccatggtttatccatgttgtgtgtccattagtgagtagtgggaagaatcatatcatgttggcaatgaaaggggggctatggctctggggtagtctagtctgaacctcttattttacggatgagaaagctgaggtacaaagcagggaagggatttcttgaggtcacccagccagcaactgagctgcaaccagaagctgagatccccaggactagggccgagcctcattctgtcccatcacagtgacttttcttccctcctccaaactatttttattttttatttttttgcagctgcttagcagcttgaagttagaagaaagggcagggaaaaggttttccgtgcttagccagggaaggaatcctgcaacaggatgtggggttgggtcattcaaattgggccagactccactggtcttgttgcttcttgcttggtattgcagatgggtttaaaagtgttaggattagagagataggcaggtttagccaaaggcagtttgtagccttgtggcagagttctttttaaagaaggaagtgggatgcaacaccctgacacaaaggggcttaagttgttataccactgcctgctaacctgttttccttaactctcttcctgatttctaaaggaagtatattttgctgaatcagaaagaaaagtgatttatttcaggttgctgatgcttagattgttagagttggaaagatctggcttgcatcttgtacagctgacagaactggggctcaggggggcacaggtgcccagagttggtcagtcaggaaagtagcaccagaaccagtctcctggtggccctacagttgcagacccttttttgctttgctctctgtgtatactaaagcttctatgtctctgaatctcaagttctgactggtagctactttccaatccacctggcttagatttctagattatattgtttagacgtcagaacctcttaagggttttggggccacttgttagctcacatagtgagaaccagccctgcccattaggtaggggaagaagttagcagtccatgatagctgttgcctgcagcgtatggatgttcattgcacagttcctgtctcctgagatcctggagtgtatacgcttggcctcagagcccagcacagagcctggcccttgggacatgcttagtaagtatttactgaatgagtgggaaatgtcttaaggcccattagtttgcaggtcttgaggaggctcccttgcactaggaagaatagaaagcatacataaagcctgtgtgctgccgccaggaagactagaaacgctatgttcagcctggagctgaatggtataccccagagcaaccctgttgaaaggcagtgcttgccttttcattctgtgtcctggtttgctggtaactcctgggtcccctgcctctcctgtacccccattgtgcagactgaggggggaccatcagccagggttagttttccgctgtttctgttaggcaaagaataaattgaattgagttgtgaaagttgggtgcaaagctcagtttgggtccaaagtaacagttaacttgtgtgggtggcaggtattcagtacaaacagggctggggacaggaaggggaagagaacttcagagctttcacgatcctcatctggttttaggctgatccagaggccaaggtccccatggaacaaactggacaaagtgagggtggccacatggcctcttttcttttgcctttattattaattttctcaaatagatctgactagtcatgtggctgggaaaatagttaattgtgatttttttttttttaaactgagtctcactctattgcccaggctggagtgcagtggtatgatctcagctcgccgcaacctctgcctcccgggatcaagcaattgtcatgcctcagcctcccgggtagctgggattatgggcacacagcaccacgcctggctaatttttgtatttttagtagagacatggttttagcatgttggccaggctggtcttgaactcctgacctcaagtgatccacccacctcagccttccaatctgctgggattacaggcatgagccactgcacccagccagagtaccactatttgggcattctttaatgaaaaagaatgaactatccaaaaattaaaactcctcatttatgagcttttagagaattttacagagtagatggaaactctctgcatcctttccccacttctagtttcacctgacacatttcttccctgtccttactcctgggccggcagcagtggtcatgattccaatcccagcttggccaccatctgcctcagtggcctaggaaaactcctttctccagagctttagttttctcttctacggaatgaagaa

SEQ ID NO: 749 - DNA, 4047 bp, Homo sapiens
gtctattttcagaaatgcattcttcattcccagatgataacatctatagaactaaaatgattaggaccataacacgtagctcctagcctgctgtcggaacacctcccgagtccctctttgtgggtgaacccagaggctgggagctggtgactcatgatccattgagaagcagtcatgatgcagagctgtgtgttggaggtctcagctgagagggctggattagcagtcctcattggtgtatggctttgcagcaataactgatggctgtttcccctcctgctttatctttcagttaatgaccagccacggcgtccctgctgtgagctctggccgctgccttccagggctcccgagccacacgctgggggtgctggctgagggaacatggcttgttggcctcagctgaggttgctgctgtggaagaacctcactttcagaagaagacaaacagtaagcttgggtttttcagcagcggggggttctctcattttttctttgtggttttgagttggggattggaggagggagggagggaaggaagctgtgttggttttcacacagggattgatggaatctggctcttatggacacaggactgtgtggtccggatatggcatgtggcttatcatagagggcagatttgcagccaggtagaaatagtagctttggtttgtgctactgcccaggcatgagttctgatccctaggacctggctccgaatcgcccctgagcaccccactttttccttttgctgcagccctgggagccacctggctctccaaaagcccctaatgggcccctgtatttctggaagctgtgggtgaagtgagttagtggccccactcttagagatcaatactgggtatcttggtgtcaatctggattctttccttcaggcctggaggaatataataactgagacttgttttatttctgcagagggttctaagccattcacttcccagatgggccaataatgctttgagtaatctggagatcatctttaatgcgcaggtgaatggaactcttccacagagggatgtgagggctgtagagcagagtgaactccctgaaactcagacgtcagctctttgtctctctatctctgaacacccttccttagagatcccatctctaggatgcatttctctgtagttagtttctaagtctcttgttcctgttctgcctttatttttttttcctggattctaagccagtatccccacttggctgtcttaatgtagcttaacatgtctgtaatcaaaatgatcatctttctgagattcaaagggctataagggactttggagagaatttcattcagttttcctcaaactagaataatgcttgcactgtctgtaaaagaacaaaagtgtcaaagcatccttttgttcactaaatttccttttttattatagtgttacttaaatattaggaagtaaaagtaggtataaacttcttataggctgttattatacaactatatgacccatacatatttacaaattaagtgcagccaaaattgcaaaatcaataccattcaaattaataccttaaatgtggtgaggcagctgttgttcaactgaaaccaaattataagttgcatggcagtaaatgctatcatgctgatcattttgagtttggccagtctatattatcatgtgctaatgattgaattctccacccatttttctacttgtatgaccttaatttgatggcacctgttccatcctcatgagtttgctacaattatactggtgccaacacaatcataaacacaaatataaacttgggctttgaaatcttgtgccagaacttggctttaaagtaagcatttaaaaaatccatatgtgtttattagactttgtttagatgactgttgaaatgaaaacaaagtgtttaaaatcctcttagagaacttaaatataatccctcagcaatatgtatacagatcttcctttgagaaaaactgattgtgttcagcctctcatgttacaaatggggaacctgaattctgaggtctctagtgagagaacagggactggaatctgtggatcctatctgttttaataataattgtaaagtataatagataatattatattaataaaataaaagcaaacacttagaatgagcttccatgtgtgaggcactaactgattaggcattattaactagatttattccttttaaggccccgcgatgtactgttatttccacatgttgtagctggggaacgtgctactcagagaggttaagtaacttgtctgaggtccacaccactaacaaggagcacaggtagggttcaaatccagataatctgactttggagctggcactctaactcaatgtgcctaatcgcttttcagtggtgtcattattttgcctattctccatctgagaatattgaagtttctgactccttccttgcctttctccctgcctcccgtggttatccccaggtcttggtgttccagtcctctatgtccgtccttactcttattcctttgctacagtgtgatccagggctcctgccccttcttatcctggtagagggggcccacttgctgggaaattgtctccgccatggtttatccatgttgtgtgtccattagtgagtagtgggaagaatcatatcatgttggcaatgaaaggggggctatggctctggggtagtctagtctgaacctcttattttacggatgagaaagctgaggtacaaagcagggaagggatttcttgaggtcacccagccagcaactgagctgcaaccagaagctgagatccccaggactagggccgagcctcattctgtcccatcacagtgacttttcttccctcctccaaactatttttattttttatttttttgcagctgcttagcagcttgaagttagaagaaagggcagggaaaaggttttccgtgcttagccagggaaggaatcctgcaacaggatgtggggttgggtcattcaaattgggccagactccactggtcttgttgcttcttgcttggtattgcagatgggtttaaaagtgttaggattagagagataggcaggtttagccaaaggcagtttgtagccttgtggcagagttctttttaaagaaggaagtgggatgcaacaccctgacacaaaggggcttaagttgttataccactgcctgctaacctgttttccttaactctcttcctgatttctaaaggaagtatattttgctgaatcagaaagaaaagtgatttatttcaggttgctgatgcttagattgttagagttggaaagatctggcttgcatcttgtacagctgacagaactggggctcaggggggcacaggtgcccagagttggtcagtcaggaaagtagcaccagaaccagtctcctggtggccctacagttgcagacccttttttgctttgctctctgtgtatactaaagcttctatgtctctgaatctcaagttctgactggtagctactttccaatccacctggcttagatttctagattatattgtttagacgtcagaacctcttaagggttttggggccacttgttagctcacatagtgagaaccagccctgcccattaggtaggggaagaagttagcagtccatgatagctgttgcctgcagcgtatggatgttcattgcacagttcctgtctcctgagatcctggagtgtatacgcttggcctcagagcccagcacagagcctggcccttgggacatgcttagtaagtatttactgaatgagtgggaaatgtcttaaggcccattagtttgcaggtcttgaggaggctcccttgcactaggaagaatagaaagcatacataaagcctgtgtgctgccgccaggaagactagaaacgctatgttcagcctggagctgaatggtataccccagagcaaccctgttgaaaggcagtgcttgccttttcattctgtgtcctggtttgctggtaactcctgggtcccctgcctctcctgtacccccattgtgcagactgaggggggaccatcagccagggttagttttccgctgtttc

SEQ ID NO: 750 - DNA, 4053 bp, Homo sapiens
ttggaatgaagaaagataaatggggagaagggaactcacattgctttggcacttaaattaagccatgtactgtgttgggaaattatttatattatctcgttgaatccacagtagaacacagttgaacaccatacaaggtaagtattgtcatccttattttaccatgaggaaattgatgcttagagagcataaagccttggccaggggcacatagttgggaagccggggctaattcatgcctgggctctttctgatagttttccttttttaattgtcccctcctcattgttaccttggggatttcaagagattcatgtagcttctaaatcaacgaactgattcctggagagcagcttctgtatgagaaaaatctagctaattatttatttcagtgtctctggaatgcaagctctgtcctgagccacttagaaaacaatttgggatgacaagcatgtgtctcacaatgctgctctggttgccagtgctgtgctgccagttgtcatctttgaacaaactgatgcagtgctggtttaactcttcctctttttggagtaagaaactttggaggcctgtgtccttctagaagtttgctgagcaaatggtaaggaaaagaaataggtcctaaggcttgactatttcagagaatttcttgatttattggactgtcaatgaatgaattggaatacatagtggtaggctgtcttttcttctcagacactgcaatttcctccaatctcttgacttttctagaagttttaatccaagtccttgttgggtggtagataaaagggtattgttctactagagactgaccttggcatggagatctcatttggactcacagatttctagtctagcgcttggttttgtatccatacctcgctactgcattcttagttccttctgctccttgttcctcatgcccagtgtcccaccctacccttgcccctactcctctagaggccacagtgattcactgagccatttcataagcacagctaggagagttcatggctaccaagtgccagcagggccgaattttcacctgtgtgtcctcccttccatttttcatcttctgccccctccccagctttaactttaatataactacttgggactattccagcattaaataagggtaactgctggatgggtggctgggatacacagaatgtagtatcccttgttcacgagaagaccttcttgccctagcatggcaaacagtcctccaaggaggcacctgtgacacccaacggagtaggggggcggtgtgttcaggtgcaggtggaacaaggccagaagtgtgcatatgtgctgaccatgggagcttgtttgtcggtttcacagttgatgccctgagcctgccatagcagacttgtttctccatgggatgctgttttctttccagagacacagcgctagggttgtcctcattacctgagagccaggtgtcggtagcattttcttggtgtttactcacactcatctaaggcacgttgtggttttccagattaggaaactgctttattgatggtgctttttttttttttttttgagacagagtctcgctctgtcgccatgctggagtgtagtggcacaatcttggctcactgcacctccgcctgccaggttcagcgattctcctgcctcagcctcccaagtagctgggactacaggtgcctgccaccatgcccagctaatttttgtatttttagtagagacggggtttcaccgtattggctaggatggtctcgatttcttgacctcgtgatccgcctgcctcggcctcccaaagtgctgggattataggcttgagccaccacgcctggccgatggtgctttttatcatttgaaggactcagttgtataacccactgaaaattagtatgtaaggaagttcagggaatagtataagtcactccaggcttgaggcaaaatttacaaatgctgctgactttgtatgtaaggggaggcattttcttagaaaagagaggtaggtctctgggattccagtatgccatttccatcctcagtgtttttggccacctgagagaggtctattttcagaaatgcattcttcattcccagatgataacatctatagaactaaaatgattaggaccataacacgtagctcctagcctgctgtcggaacacctcccgagtccctctttgtgggtgaacccagaggctgggagctggtgactcatgatccattgagaagcagtcatgatgcagagctgtgtgttggaggtctcagctgagagggctggattagcagtcctcattggtgtatggctttgcagcaataactgatggctgtttcccctcctgctttatctttcagttaatgaccagccacggcgtccctgctgtgagctctggccgctgccttccagggctcccgagccacacgctgggggtgctggctgagggaacatggcttgttggcctcagctgaggttgctgctgtggaagaacctcactttcagaagaagacaaacagtaagcttgggtttttcagcagcggggggttctctcattttttctttgtggttttgagttggggattggaggagggagggagggaaggaagctgtgttggttttcacacagggattgatggaatctggctcttatggacacaggactgtgtggtccggatatggcatgtggcttatcatagagggcagatttgcagccaggtagaaatagtagctttggtttgtgctactgcccaggcatgagttctgatccctaggacctggctccgaatcgcccctgagcaccccactttttccttttgctgcagccctgggagccacctggctctccaaaagcccctaatgggcccctgtatttctggaagctgtgggtgaagtgagttagtggccccactcttagagatcaatactgggtatcttggtgtcaatctggattctttccttcaggcctggaggaatataataactgagacttgttttatttctgcagagggttctaagccattcacttcccagatgggccaataatgctttgagtaatctggagatcatctttaatgcgcaggtgaatggaactcttccacagagggatgtgagggctgtagagcagagtgaactccctgaaactcagacgtcagctctttgtctctctatctctgaacacccttccttagagatcccatctctaggatgcatttctctgtagttagtttctaagtctcttgttcctgttctgcctttatttttttttcctggattctaagccagtatccccacttggctgtcttaatgtagcttaacatgtctgtaatcaaaatgatcatctttctgagattcaaagggctataagggactttggagagaatttcattcagttttcctcaaactagaataatgcttgcactgtctgtaaaagaacaaaagtgtcaaagcatccttttgttcactaaatttccttttttattatagtgttacttaaatattaggaagtaaaagtaggtataaacttcttataggctgttattatacaactatatgacccatacatatttacaaattaagtgcagccaaaattgcaaaatcaataccattcaaattaataccttaaatgtggtgaggcagctgttgttcaactgaaaccaaattataagttgcatggcagtaaatgctatcatgctgatcattttgagtttggccagtctatattatcatgtgctaatgattgaattctccacccatttttctacttgtatgaccttaatttgatggcacctgttccatcctcatgagtttgctacaattatactggtgccaacacaatcataaacacaaatataaacttgggctttgaaatcttgtgccagaacttggctttaaagtaagcatttaaaaaatccatatgtgtttattagactttgtttagatgactgttgaaatgaaaacaaagtgtttaaaatcctcttagagaacttaaatataatccctcagcaatatgtatacagatcttcctttgagaaaaactgattgtgttcagcctctcatgttacaa

SEQ ID NO: 751 - DNA, 4097 bp, Homo sapiens
ttcatccttactgctttgcccctcctatctttccagaaacccacaatggatttgctagaaataatggaacgtcctgtttggacaggatataaccatttctcagctagaggatattgttggaatgaagaaagataaatggggagaagggaactcacattgctttggcacttaaattaagccatgtactgtgttgggaaattatttatattatctcgttgaatccacagtagaacacagttgaacaccatacaaggtaagtattgtcatccttattttaccatgaggaaattgatgcttagagagcataaagccttggccaggggcacatagttgggaagccggggctaattcatgcctgggctctttctgatagttttccttttttaattgtcccctcctcattgttaccttggggatttcaagagattcatgtagcttctaaatcaacgaactgattcctggagagcagcttctgtatgagaaaaatctagctaattatttatttcagtgtctctggaatgcaagctctgtcctgagccacttagaaaacaatttgggatgacaagcatgtgtctcacaatgctgctctggttgccagtgctgtgctgccagttgtcatctttgaacaaactgatgcagtgctggtttaactcttcctctttttggagtaagaaactttggaggcctgtgtccttctagaagtttgctgagcaaatggtaaggaaaagaaataggtcctaaggcttgactatttcagagaatttcttgatttattggactgtcaatgaatgaattggaatacatagtggtaggctgtcttttcttctcagacactgcaatttcctccaatctcttgacttttctagaagttttaatccaagtccttgttgggtggtagataaaagggtattgttctactagagactgaccttggcatggagatctcatttggactcacagatttctagtctagcgcttggttttgtatccatacctcgctactgcattcttagttccttctgctccttgttcctcatgcccagtgtcccaccctacccttgcccctactcctctagaggccacagtgattcactgagccatttcataagcacagctaggagagttcatggctaccaagtgccagcagggccgaattttcacctgtgtgtcctcccttccatttttcatcttctgccccctccccagctttaactttaatataactacttgggactattccagcattaaataagggtaactgctggatgggtggctgggatacacagaatgtagtatcccttgttcacgagaagaccttcttgccctagcatggcaaacagtcctccaaggaggcacctgtgacacccaacggagtaggggggcggtgtgttcaggtgcaggtggaacaaggccagaagtgtgcatatgtgctgaccatgggagcttgtttgtcggtttcacagttgatgccctgagcctgccatagcagacttgtttctccatgggatgctgttttctttccagagacacagcgctagggttgtcctcattacctgagagccaggtgtcggtagcattttcttggtgtttactcacactcatctaaggcacgttgtggttttccagattaggaaactgctttattgatggtgctttttttttttttttttgagacagagtctcgctctgtcgccatgctggagtgtagtggcacaatcttggctcactgcacctccgcctgccaggttcagcgattctcctgcctcagcctcccaagtagctgggactacaggtgcctgccaccatgcccagctaatttttgtatttttagtagagacggggtttcaccgtattggctaggatggtctcgatttcttgacctcgtgatccgcctgcctcggcctcccaaagtgctgggattataggcttgagccaccacgcctggccgatggtgctttttatcatttgaaggactcagttgtataacccactgaaaattagtatgtaaggaagttcagggaatagtataagtcactccaggcttgaggcaaaatttacaaatgctgctgactttgtatgtaaggggaggcattttcttagaaaagagaggtaggtctctgggattccagtatgccatttccatcctcagtgtttttggccacctgagagaggtctattttcagaaatgcattcttcattcccagatgataacatctatagaactaaaatgattaggaccataacacgtagctcctagcctgctgtcggaacacctcccgagtccctctttgtgggtgaacccagaggctgggagctggtgactcatgatccattgagaagcagtcatgatgcagagctgtgtgttggaggtctcagctgagagggctggattagcagtcctcattggtgtatggctttgcagcaataactgatggctgtttcccctcctgctttatctttcagttaatgaccagccacggcgtccctgctgtgagctctggccgctgccttccagggctcccgagccacacgctgggggtgctggctgagggaacatggcttgttggcctcagctgaggttgctgctgtggaagaacctcactttcagaagaagacaaacagtaagcttgggtttttcagcagcggggggttctctcattttttctttgtggttttgagttggggattggaggagggagggagggaaggaagctgtgttggttttcacacagggattgatggaatctggctcttatggacacaggactgtgtggtccggatatggcatgtggcttatcatagagggcagatttgcagccaggtagaaatagtagctttggtttgtgctactgcccaggcatgagttctgatccctaggacctggctccgaatcgcccctgagcaccccactttttccttttgctgcagccctgggagccacctggctctccaaaagcccctaatgggcccctgtatttctggaagctgtgggtgaagtgagttagtggccccactcttagagatcaatactgggtatcttggtgtcaatctggattctttccttcaggcctggaggaatataataactgagacttgttttatttctgcagagggttctaagccattcacttcccagatgggccaataatgctttgagtaatctggagatcatctttaatgcgcaggtgaatggaactcttccacagagggatgtgagggctgtagagcagagtgaactccctgaaactcagacgtcagctctttgtctctctatctctgaacacccttccttagagatcccatctctaggatgcatttctctgtagttagtttctaagtctcttgttcctgttctgcctttatttttttttcctggattctaagccagtatccccacttggctgtcttaatgtagcttaacatgtctgtaatcaaaatgatcatctttctgagattcaaagggctataagggactttggagagaatttcattcagttttcctcaaactagaataatgcttgcactgtctgtaaaagaacaaaagtgtcaaagcatccttttgttcactaaatttccttttttattatagtgttacttaaatattaggaagtaaaagtaggtataaacttcttataggctgttattatacaactatatgacccatacatatttacaaattaagtgcagccaaaattgcaaaatcaataccattcaaattaataccttaaatgtggtgaggcagctgttgttcaactgaaaccaaattataagttgcatggcagtaaatgctatcatgctgatcattttgagtttggccagtctatattatcatgtgctaatgattgaattctccacccatttttctacttgtatgaccttaatttgatggcacctgttccatcctcatgagtttgctacaattatactggtgccaacacaatcataaacacaaatataaacttgggctttgaaatcttgtgccagaacttggctttaaagtaagcatttaaaaaatccatatgtgtttattagactttgtttagatgactgttgaaatgaaaacaaagtgtttaaaatcctcttagagaacttaaata

SEQ ID NO: 752 - DNA, 4057 bp, Homo sapiens
gtcttccaagttatgacttgtgaggtatgttaattatgataatagaaggcagtttatttggttcagatttattgatgtgtaatttaccacagtaagacttcccctttacaaaagtatgatgagttttgacaaatggatacacatgtgtatctaccactgccatgctccttttcagtctgtcgtcccctccacccatgaccactggtcaccactgcagtgatttctgtccccttcatttcaccttttccagaatgtcatataaatggaatcatgcagtatgtagttttttgtgtctggcttatttttcttagcattaggcttttgggattcatccaggttgtcgcatgtaacagtagcttattcctttttatggctgagtaagtgtcccagttttatttatatatttatttatgaggaggtgtctcactctgtcacccaggctggagtgcggtagcgcgatctcagctcactgcaacctccgcctcccaggttcaagcaattctcctgcctcctgagtagctgggattacaggcacccaccgccacgcccaactaatttttatatttttagtagagatggggtttcaccatgttggccaggctgatctcaaactcttgacctcaggtgatccgcccacctctggctcccaaagtgctaggattacaggcatgagccactgtgcccagccccagttttatttattcaccagttgatggtcttttcgacaactaattgtttccagtttttggctattctgtataaggcttctataaatattcacaaatacctaggatgggatgactgggtcatataatagtactgtataaccttagcagaaactgtcaaactattttccaaagtggctcttccattttacaattccacagtgtattgagtcccagtgtctccatacacatgctagcacttttaatatttaatttagtgggtatgtaatgatatctcattgtggttttaatttgcatttctctgcagctaatgatgagtgtttctgcttatttgggaaggttttaatttagcagtctgttgtattctgtagatattaataacttcaaaatatcagtggcatttgcagttaaaatttccttaaaaaattggccaaaggtttccagcagtcacttctgccatgcccaaactgtatgaaacaaggctgaggtgtggagattgtcacattttggcaaggagtgatccacttgggtgactgatgagacccagagagcgtacgcctcgggcttgagggtgaggacgggcgggaagtcgactgcatggccctgctggccttgggaggctgcccagtccttagctaaagctggcagttatgggaaacagacttagattctattacgtttttcaggatgtcccaggagtcacctgggaagctcagcagtcctttgtgactttcaagcatatggtagaagctgctgaacacagagctccctctttggggataatttgcccaaatcatttaatcaggcttgagaaatgagttaccacaggtccaggagtgctgccacccttgaattctgacaccctatttctcctatccgtctcttaattaattaagcagacatccccaagtgcttacgacaagccaggacccttttgcatactaaggaaaacagggatgaaggaaacagaaatggtctctgctctgactcagaaggtagaaatcctctttcccagccaagtcttcctagggagcacgtaggaagggctctgaacccacgtgtcagttgcaggggaggatatcaggaaaggacattgaagaagtggagacctaagtttgagacctaggcattagccaggctagcagtgcttgaaaaagtgtcttaggacaagagaactcaccagtgaagtcccagtggtaggagagcgtgcagcatattctgagcctgtatacacatctccagggcattgcttagcaggtggggagtggcaagagagtaggctggagtcacagaagggaggccaggtagaccttggtgagcactggactctatgttcaggtgctgaggagctggcaaaaggttttaagtcggggagaggcatgttcagatatttggtctagctgagtaactttgggtgctctgtgacaaatggttgggagaccagtgaggtggcagttgcggtcatctaggagcaggatcagagtggcctattgactgggatgactgtgaagtgggatcctttccagccagtaactggaaatgtgtatgagggcagaagtgagtgtactgcatttgaaacattgagaaatctagtacatagtactgtctcttttatatcttttttttttttttttttgattttggtttgtttgttcactaacttggaaaactgatgtggaaatgtccctttggcttcagttacctgagcagaaggggccgggcattgccaaactctcctcttaggacagaattgctcccagtattgatcattgtgttctgagttgggggagcaaattgtgcaggaggccaggtcagtgccaaggtgggtgggaggaattggagcaggaagcttgcctaagtgtgcccagcaaagccacggtagaactttctactgtggctctatgctacttcttagcaaccttctccatgtgcttcctggagagtccttggagtcagaacctttttcttgaaacccagacactttacttccaagaaaatgctgtccaagaaaactcatccttcccttcttctcatgaacgttgtgtagaggtgtgtcttctcttcctttgagcttttccactcagggtttaggggaggtgatattctatatttgggtttggctctgggtactgcaacactaggctattaagatttcatccttactgctttgcccctcctatctttccagaaacccacaatggatttgctagaaataatggaacgtcctgtttggacaggatataaccatttctcagctagaggatattgttggaatgaagaaagataaatggggagaagggaactcacattgctttggcacttaaattaagccatgtactgtgttgggaaattatttatattatctcgttgaatccacagtagaacacagttgaacaccatacaaggtaagtattgtcatccttattttaccatgaggaaattgatgcttagagagcataaagccttggccaggggcacatagttgggaagccggggctaattcatgcctgggctctttctgatagttttccttttttaattgtcccctcctcattgttaccttggggatttcaagagattcatgtagcttctaaatcaacgaactgattcctggagagcagcttctgtatgagaaaaatctagctaattatttatttcagtgtctctggaatgcaagctctgtcctgagccacttagaaaacaatttgggatgacaagcatgtgtctcacaatgctgctctggttgccagtgctgtgctgccagttgtcatctttgaacaaactgatgcagtgctggtttaactcttcctctttttggagtaagaaactttggaggcctgtgtccttctagaagtttgctgagcaaatggtaaggaaaagaaataggtcctaaggcttgactatttcagagaatttcttgatttattggactgtcaatgaatgaattggaatacatagtggtaggctgtcttttcttctcagacactgcaatttcctccaatctcttgacttttctagaagttttaatccaagtccttgttgggtggtagataaaagggtattgttctactagagactgaccttggcatggagatctcatttggactcacagatttctagtctagcgcttggttttgtatccatacctcgctactgcattcttagttccttctgctccttgttcctcatgcccagtgtcccaccctacccttgcccctactcctctagaggccacagtgattcactgagccatttcataagcacagctaggagagttcatggctaccaagtgccagcagggccgaattttcacctgtgtgtcctcccttccatttttcatcttctgccccctccccagctttaactttaat

SEQ ID NO: 753 - DNA, 4048 bp, Homo sapiens
gataaatatttgttgtggctcatgggcaccttgcagagttaaggctgcagttgtttgtggaatttataagtggtaatgaatatttatctactattcctcttccaaggcgatcacacaataatcaggctttacactatccagttcttaggtcttccaagttatgacttgtgaggtatgttaattatgataatagaaggcagtttatttggttcagatttattgatgtgtaatttaccacagtaagacttcccctttacaaaagtatgatgagttttgacaaatggatacacatgtgtatctaccactgccatgctccttttcagtctgtcgtcccctccacccatgaccactggtcaccactgcagtgatttctgtccccttcatttcaccttttccagaatgtcatataaatggaatcatgcagtatgtagttttttgtgtctggcttatttttcttagcattaggcttttgggattcatccaggttgtcgcatgtaacagtagcttattcctttttatggctgagtaagtgtcccagttttatttatatatttatttatgaggaggtgtctcactctgtcacccaggctggagtgcggtagcgcgatctcagctcactgcaacctccgcctcccaggttcaagcaattctcctgcctcctgagtagctgggattacaggcacccaccgccacgcccaactaatttttatatttttagtagagatggggtttcaccatgttggccaggctgatctcaaactcttgacctcaggtgatccgcccacctctggctcccaaagtgctaggattacaggcatgagccactgtgcccagccccagttttatttattcaccagttgatggtcttttcgacaactaattgtttccagtttttggctattctgtataaggcttctataaatattcacaaatacctaggatgggatgactgggtcatataatagtactgtataaccttagcagaaactgtcaaactattttccaaagtggctcttccattttacaattccacagtgtattgagtcccagtgtctccatacacatgctagcacttttaatatttaatttagtgggtatgtaatgatatctcattgtggttttaatttgcatttctctgcagctaatgatgagtgtttctgcttatttgggaaggttttaatttagcagtctgttgtattctgtagatattaataacttcaaaatatcagtggcatttgcagttaaaatttccttaaaaaattggccaaaggtttccagcagtcacttctgccatgcccaaactgtatgaaacaaggctgaggtgtggagattgtcacattttggcaaggagtgatccacttgggtgactgatgagacccagagagcgtacgcctcgggcttgagggtgaggacgggcgggaagtcgactgcatggccctgctggccttgggaggctgcccagtccttagctaaagctggcagttatgggaaacagacttagattctattacgtttttcaggatgtcccaggagtcacctgggaagctcagcagtcctttgtgactttcaagcatatggtagaagctgctgaacacagagctccctctttggggataatttgcccaaatcatttaatcaggcttgagaaatgagttaccacaggtccaggagtgctgccacccttgaattctgacaccctatttctcctatccgtctcttaattaattaagcagacatccccaagtgcttacgacaagccaggacccttttgcatactaaggaaaacagggatgaaggaaacagaaatggtctctgctctgactcagaaggtagaaatcctctttcccagccaagtcttcctagggagcacgtaggaagggctctgaacccacgtgtcagttgcaggggaggatatcaggaaaggacattgaagaagtggagacctaagtttgagacctaggcattagccaggctagcagtgcttgaaaaagtgtcttaggacaagagaactcaccagtgaagtcccagtggtaggagagcgtgcagcatattctgagcctgtatacacatctccagggcattgcttagcaggtggggagtggcaagagagtaggctggagtcacagaagggaggccaggtagaccttggtgagcactggactctatgttcaggtgctgaggagctggcaaaaggttttaagtcggggagaggcatgttcagatatttggtctagctgagtaactttgggtgctctgtgacaaatggttgggagaccagtgaggtggcagttgcggtcatctaggagcaggatcagagtggcctattgactgggatgactgtgaagtgggatcctttccagccagtaactggaaatgtgtatgagggcagaagtgagtgtactgcatttgaaacattgagaaatctagtacatagtactgtctcttttatatcttttttttttttttttttgattttggtttgtttgttcactaacttggaaaactgatgtggaaatgtccctttggcttcagttacctgagcagaaggggccgggcattgccaaactctcctcttaggacagaattgctcccagtattgatcattgtgttctgagttgggggagcaaattgtgcaggaggccaggtcagtgccaaggtgggtgggaggaattggagcaggaagcttgcctaagtgtgcccagcaaagccacggtagaactttctactgtggctctatgctacttcttagcaaccttctccatgtgcttcctggagagtccttggagtcagaacctttttcttgaaacccagacactttacttccaagaaaatgctgtccaagaaaactcatccttcccttcttctcatgaacgttgtgtagaggtgtgtcttctcttcctttgagcttttccactcagggtttaggggaggtgatattctatatttgggtttggctctgggtactgcaacactaggctattaagatttcatccttactgctttgcccctcctatctttccagaaacccacaatggatttgctagaaataatggaacgtcctgtttggacaggatataaccatttctcagctagaggatattgttggaatgaagaaagataaatggggagaagggaactcacattgctttggcacttaaattaagccatgtactgtgttgggaaattatttatattatctcgttgaatccacagtagaacacagttgaacaccatacaaggtaagtattgtcatccttattttaccatgaggaaattgatgcttagagagcataaagccttggccaggggcacatagttgggaagccggggctaattcatgcctgggctctttctgatagttttccttttttaattgtcccctcctcattgttaccttggggatttcaagagattcatgtagcttctaaatcaacgaactgattcctggagagcagcttctgtatgagaaaaatctagctaattatttatttcagtgtctctggaatgcaagctctgtcctgagccacttagaaaacaatttgggatgacaagcatgtgtctcacaatgctgctctggttgccagtgctgtgctgccagttgtcatctttgaacaaactgatgcagtgctggtttaactcttcctctttttggagtaagaaactttggaggcctgtgtccttctagaagtttgctgagcaaatggtaaggaaaagaaataggtcctaaggcttgactatttcagagaatttcttgatttattggactgtcaatgaatgaattggaatacatagtggtaggctgtcttttcttctcagacactgcaatttcctccaatctcttgacttttctagaagttttaatccaagtccttgttgggtggtagataaaagggtattgttctactagagactgaccttggcatggagatctcatttggactcacagatttctagtctagcgcttggttttgtatccatacctcgctactgcattcttagttccttctgctccttgttcctcatgcccagtgtcccaccctacccttgc

SEQ ID NO: 754 - DNA, 4100 bp, Homo sapiens
tctcagttcattgtcctaaagatgcttcatcagaaaggaataacttccaccccgttactctctgtccccttactctgctttatttttcttcgtcaatcctaccaccaccacccactgtttgaacaacccactattatttgtctgtttcccatccctggtagaataggagccccatgaatgaaggaactttgcttctgttgttcaccactgaatctctaaggtatggaacacacctggcatgtgataggcactcgataaatatttgttgtggctcatgggcaccttgcagagttaaggctgcagttgtttgtggaatttataagtggtaatgaatatttatctactattcctcttccaaggcgatcacacaataatcaggctttacactatccagttcttaggtcttccaagttatgacttgtgaggtatgttaattatgataatagaaggcagtttatttggttcagatttattgatgtgtaatttaccacagtaagacttcccctttacaaaagtatgatgagttttgacaaatggatacacatgtgtatctaccactgccatgctccttttcagtctgtcgtcccctccacccatgaccactggtcaccactgcagtgatttctgtccccttcatttcaccttttccagaatgtcatataaatggaatcatgcagtatgtagttttttgtgtctggcttatttttcttagcattaggcttttgggattcatccaggttgtcgcatgtaacagtagcttattcctttttatggctgagtaagtgtcccagttttatttatatatttatttatgaggaggtgtctcactctgtcacccaggctggagtgcggtagcgcgatctcagctcactgcaacctccgcctcccaggttcaagcaattctcctgcctcctgagtagctgggattacaggcacccaccgccacgcccaactaatttttatatttttagtagagatggggtttcaccatgttggccaggctgatctcaaactcttgacctcaggtgatccgcccacctctggctcccaaagtgctaggattacaggcatgagccactgtgcccagccccagttttatttattcaccagttgatggtcttttcgacaactaattgtttccagtttttggctattctgtataaggcttctataaatattcacaaatacctaggatgggatgactgggtcatataatagtactgtataaccttagcagaaactgtcaaactattttccaaagtggctcttccattttacaattccacagtgtattgagtcccagtgtctccatacacatgctagcacttttaatatttaatttagtgggtatgtaatgatatctcattgtggttttaatttgcatttctctgcagctaatgatgagtgtttctgcttatttgggaaggttttaatttagcagtctgttgtattctgtagatattaataacttcaaaatatcagtggcatttgcagttaaaatttccttaaaaaattggccaaaggtttccagcagtcacttctgccatgcccaaactgtatgaaacaaggctgaggtgtggagattgtcacattttggcaaggagtgatccacttgggtgactgatgagacccagagagcgtacgcctcgggcttgagggtgaggacgggcgggaagtcgactgcatggccctgctggccttgggaggctgcccagtccttagctaaagctggcagttatgggaaacagacttagattctattacgtttttcaggatgtcccaggagtcacctgggaagctcagcagtcctttgtgactttcaagcatatggtagaagctgctgaacacagagctccctctttggggataatttgcccaaatcatttaatcaggcttgagaaatgagttaccacaggtccaggagtgctgccacccttgaattctgacaccctatttctcctatccgtctcttaattaattaagcagacatccccaagtgcttacgacaagccaggacccttttgcatactaaggaaaacagggatgaaggaaacagaaatggtctctgctctgactcagaaggtagaaatcctctttcccagccaagtcttcctagggagcacgtaggaagggctctgaacccacgtgtcagttgcaggggaggatatcaggaaaggacattgaagaagtggagacctaagtttgagacctaggcattagccaggctagcagtgcttgaaaaagtgtcttaggacaagagaactcaccagtgaagtcccagtggtaggagagcgtgcagcatattctgagcctgtatacacatctccagggcattgcttagcaggtggggagtggcaagagagtaggctggagtcacagaagggaggccaggtagaccttggtgagcactggactctatgttcaggtgctgaggagctggcaaaaggttttaagtcggggagaggcatgttcagatatttggtctagctgagtaactttgggtgctctgtgacaaatggttgggagaccagtgaggtggcagttgcggtcatctaggagcaggatcagagtggcctattgactgggatgactgtgaagtgggatcctttccagccagtaactggaaatgtgtatgagggcagaagtgagtgtactgcatttgaaacattgagaaatctagtacatagtactgtctcttttatatcttttttttttttttttttgattttggtttgtttgttcactaacttggaaaactgatgtggaaatgtccctttggcttcagttacctgagcagaaggggccgggcattgccaaactctcctcttaggacagaattgctcccagtattgatcattgtgttctgagttgggggagcaaattgtgcaggaggccaggtcagtgccaaggtgggtgggaggaattggagcaggaagcttgcctaagtgtgcccagcaaagccacggtagaactttctactgtggctctatgctacttcttagcaaccttctccatgtgcttcctggagagtccttggagtcagaacctttttcttgaaacccagacactttacttccaagaaaatgctgtccaagaaaactcatccttcccttcttctcatgaacgttgtgtagaggtgtgtcttctcttcctttgagcttttccactcagggtttaggggaggtgatattctatatttgggtttggctctgggtactgcaacactaggctattaagatttcatccttactgctttgcccctcctatctttccagaaacccacaatggatttgctagaaataatggaacgtcctgtttggacaggatataaccatttctcagctagaggatattgttggaatgaagaaagataaatggggagaagggaactcacattgctttggcacttaaattaagccatgtactgtgttgggaaattatttatattatctcgttgaatccacagtagaacacagttgaacaccatacaaggtaagtattgtcatccttattttaccatgaggaaattgatgcttagagagcataaagccttggccaggggcacatagttgggaagccggggctaattcatgcctgggctctttctgatagttttccttttttaattgtcccctcctcattgttaccttggggatttcaagagattcatgtagcttctaaatcaacgaactgattcctggagagcagcttctgtatgagaaaaatctagctaattatttatttcagtgtctctggaatgcaagctctgtcctgagccacttagaaaacaatttgggatgacaagcatgtgtctcacaatgctgctctggttgccagtgctgtgctgccagttgtcatctttgaacaaactgatgcagtgctggtttaactcttcctctttttggagtaagaaactttggaggcctgtgtccttctagaagtttgctgagcaaatggtaaggaaaagaaataggtcctaaggcttgactatttcagagaatttcttgatttattggactgtcaatgaatgaattggaatacatagtggtaggctgtcttttcttctcagacactgcaatttcctccaatctcttgacttt

SEQ ID NO: 755 - DNA, 4048 bp, Homo sapiens
ttggtttagggaaaagtaaaagtaattttataatcccagctgtcatttaagccacccctttgtgggtagcatatggtccactctctcagttcattgtcctaaagatgcttcatcagaaaggaataacttccaccccgttactctctgtccccttactctgctttatttttcttcgtcaatcctaccaccaccacccactgtttgaacaacccactattatttgtctgtttcccatccctggtagaataggagccccatgaatgaaggaactttgcttctgttgttcaccactgaatctctaaggtatggaacacacctggcatgtgataggcactcgataaatatttgttgtggctcatgggcaccttgcagagttaaggctgcagttgtttgtggaatttataagtggtaatgaatatttatctactattcctcttccaaggcgatcacacaataatcaggctttacactatccagttcttaggtcttccaagttatgacttgtgaggtatgttaattatgataatagaaggcagtttatttggttcagatttattgatgtgtaatttaccacagtaagacttcccctttacaaaagtatgatgagttttgacaaatggatacacatgtgtatctaccactgccatgctccttttcagtctgtcgtcccctccacccatgaccactggtcaccactgcagtgatttctgtccccttcatttcaccttttccagaatgtcatataaatggaatcatgcagtatgtagttttttgtgtctggcttatttttcttagcattaggcttttgggattcatccaggttgtcgcatgtaacagtagcttattcctttttatggctgagtaagtgtcccagttttatttatatatttatttatgaggaggtgtctcactctgtcacccaggctggagtgcggtagcgcgatctcagctcactgcaacctccgcctcccaggttcaagcaattctcctgcctcctgagtagctgggattacaggcacccaccgccacgcccaactaatttttatatttttagtagagatggggtttcaccatgttggccaggctgatctcaaactcttgacctcaggtgatccgcccacctctggctcccaaagtgctaggattacaggcatgagccactgtgcccagccccagttttatttattcaccagttgatggtcttttcgacaactaattgtttccagtttttggctattctgtataaggcttctataaatattcacaaatacctaggatgggatgactgggtcatataatagtactgtataaccttagcagaaactgtcaaactattttccaaagtggctcttccattttacaattccacagtgtattgagtcccagtgtctccatacacatgctagcacttttaatatttaatttagtgggtatgtaatgatatctcattgtggttttaatttgcatttctctgcagctaatgatgagtgtttctgcttatttgggaaggttttaatttagcagtctgttgtattctgtagatattaataacttcaaaatatcagtggcatttgcagttaaaatttccttaaaaaattggccaaaggtttccagcagtcacttctgccatgcccaaactgtatgaaacaaggctgaggtgtggagattgtcacattttggcaaggagtgatccacttgggtgactgatgagacccagagagcgtacgcctcgggcttgagggtgaggacgggcgggaagtcgactgcatggccctgctggccttgggaggctgcccagtccttagctaaagctggcagttatgggaaacagacttagattctattacgtttttcaggatgtcccaggagtcacctgggaagctcagcagtcctttgtgactttcaagcatatggtagaagctgctgaacacagagctccctctttggggataatttgcccaaatcatttaatcaggcttgagaaatgagttaccacaggtccaggagtgctgccacccttgaattctgacaccctatttctcctatccgtctcttaattaattaagcagacatccccaagtgcttacgacaagccaggacccttttgcatactaaggaaaacagggatgaaggaaacagaaatggtctctgctctgactcagaaggtagaaatcctctttcccagccaagtcttcctagggagcacgtaggaagggctctgaacccacgtgtcagttgcaggggaggatatcaggaaaggacattgaagaagtggagacctaagtttgagacctaggcattagccaggctagcagtgcttgaaaaagtgtcttaggacaagagaactcaccagtgaagtcccagtggtaggagagcgtgcagcatattctgagcctgtatacacatctccagggcattgcttagcaggtggggagtggcaagagagtaggctggagtcacagaagggaggccaggtagaccttggtgagcactggactctatgttcaggtgctgaggagctggcaaaaggttttaagtcggggagaggcatgttcagatatttggtctagctgagtaactttgggtgctctgtgacaaatggttgggagaccagtgaggtggcagttgcggtcatctaggagcaggatcagagtggcctattgactgggatgactgtgaagtgggatcctttccagccagtaactggaaatgtgtatgagggcagaagtgagtgtactgcatttgaaacattgagaaatctagtacatagtactgtctcttttatatcttttttttttttttttttgattttggtttgtttgttcactaacttggaaaactgatgtggaaatgtccctttggcttcagttacctgagcagaaggggccgggcattgccaaactctcctcttaggacagaattgctcccagtattgatcattgtgttctgagttgggggagcaaattgtgcaggaggccaggtcagtgccaaggtgggtgggaggaattggagcaggaagcttgcctaagtgtgcccagcaaagccacggtagaactttctactgtggctctatgctacttcttagcaaccttctccatgtgcttcctggagagtccttggagtcagaacctttttcttgaaacccagacactttacttccaagaaaatgctgtccaagaaaactcatccttcccttcttctcatgaacgttgtgtagaggtgtgtcttctcttcctttgagcttttccactcagggtttaggggaggtgatattctatatttgggtttggctctgggtactgcaacactaggctattaagatttcatccttactgctttgcccctcctatctttccagaaacccacaatggatttgctagaaataatggaacgtcctgtttggacaggatataaccatttctcagctagaggatattgttggaatgaagaaagataaatggggagaagggaactcacattgctttggcacttaaattaagccatgtactgtgttgggaaattatttatattatctcgttgaatccacagtagaacacagttgaacaccatacaaggtaagtattgtcatccttattttaccatgaggaaattgatgcttagagagcataaagccttggccaggggcacatagttgggaagccggggctaattcatgcctgggctctttctgatagttttccttttttaattgtcccctcctcattgttaccttggggatttcaagagattcatgtagcttctaaatcaacgaactgattcctggagagcagcttctgtatgagaaaaatctagctaattatttatttcagtgtctctggaatgcaagctctgtcctgagccacttagaaaacaatttgggatgacaagcatgtgtctcacaatgctgctctggttgccagtgctgtgctgccagttgtcatctttgaacaaactgatgcagtgctggtttaactcttcctctttttggagtaagaaactttggaggcctgtgtccttctagaagtttgctgagcaaatggtaaggaaa

SEQ ID NO: 756 - DNA, 4041 bp, Homo sapiens
ctctctcccccaatccctccctccggctgaggaaactaacaaaggaaaaaaaaattgcggaaagcaggatttagaggaagcaaattccactggtgcccttggctgccgggaacgtggactagagagtctgcggcgcagccccgagcccagcgcttcccgcgcgtcttaggccggcgggcccgggcgggggaaggggacgcagaccgcggaccctaagacacctgctgtaccctccacccccaccccacccacctccccccaactccctagatgtgtcgtgggcggctgaacgtcgcccgtttaaggggcgggccccggctccacgtgctttctgctgagtgactgaactacataaacagaggccgggaacggggcggggaggagggagagcacaggctttgaccgatagtaacctctgcgctcggtgcagccgaatctataaaaggaactagtcccggcaaaaaccccgtaattgcgagcgagagtgagtggggccgggacccgcagagccgagccgacccttctctcccgggctgcggcagggcagggcggggagctccgcgcaccaacagagccggttctcagggcgctttgctccttgttttttccccggttctgttttctccccttctccggaaggcttgtcaaggggtaggagaaagagacgcaaacacaaaagtggaaaacaggtaagaggctctccagtgacttacttgggcgttattgttttgtttcgaggccaaggaggcttcgggaagtgctcggtttcggggactttgatccggagccccacatccccaccacttgcaactcagatgggaccggaggcggtgttaaatggggagacgatgtcctagtacgagctctggtgaccccaggactctgcgctgctgcgcttggggcttgcccgacggtggagaccggggagcatctctgggcgtggagacccgggcgcagtaccccgggctcagaggggtcgggggttcccgggcgtgctgagggcgctgctgccgggtggggagagctgcaggtccggcaccgagcgctgctttgttcggagggccctgagctggctagaaacccttctggttgcaggtcggccagtacctacggagacaaatgccagcactgagtcttcactcggttcttaagaagctggtctgttctgacctgggaattggctatatgctccccgggactggagcggcacagtcccggactgtgaatccgggaactcgagttggaggtgtcccaaacggtccgtggtgctattgctcactagaggccttgggtctttgtttgacctgaggggtagggaggtcctgcctacagtctccgtgcgctcagctgagctggtgtccctggcgcagagcgcggacgagttttgtttccttttctttttcttttttttctttcctttaagtctcggtctgtcgcccaggctggagtgcaatggaacgatctccgctcactgcaacctccgcctcccgggttcaagcgattctcctgcctcagcctcctgagtagctgggattacaggcgcgtcaccacatccagctaatttttgtatttttagtagagacggggtttcaacttgttggccaggctggtctcgaaccctcgacctcaggtgatccaccggcctcggcctccccaagtgctgggattataggcgtgagccaccgcgcgcggccgagttttgtttcttttaaaaacaagacttaggagagcctgcggagacccggaggtggggtgcccaatcctccctctcccacgttccctgcagccccatcttccagaccgttgctgctggtctctcggggcagcttctgcctgggcgcagatggggaagctgggccgaggtggtgccgtggaatgaccgggagtaaccccggcgggcggcgcagaactcggagctccgccgcggggctgggctgggctctgccgtgagggtgggggtgctgggcgcgcgggctgcggtggcccccggagactggcccgcagcgcctcctggccggaggacctaggaatcggccggctctactaggtgtctttgctcgcggttccgactgtgaatccggtgaagaccggtggttgcagacggggaggaactatgaggttgaggcgaaagcccgttttgtttttttttttttgtttttttggtttttttttttgttagcgtgtttgccaactcccaggccattggtaaagcaggaaggttcttggggcggcggacggtgccagggttatgtgtaggtgcctctttaggtatatcttttatcaaaaagaagcaaagaaataagattaaaaataaacaaagaaaaaagttgtctggcactggcagtaattggcctgcctttgcagcactgataccattagcttttaaaatccgacttttcattgacacttcaagaagagaatgggtagtatatacacattcatctcatagtggacaaatttcatatttaaaaaaaccttctgggtactgaaatcagcaagtcacttgccctccatggccgaatccctgcttcccacgaagagaacctcacaaaaatttcccccaagttaaagagtggaattttcttgatttttttttcttttttttttaacggccgtagtttagaacccagacttaaattatgatcttcttttcaaacaaaacttaaagtccttaagttttcatctccccttttatttcaacctattcttctcatacctaccacaaaaataatggaggctttctgttgagaaactttccgtttctgttgagagtatcattctcttgagaaactttctcctaaatcagagaaagtatggaagcatggaaagtattcctgagtagaacctctacagatattacaatatttttcaaatacaaagtttccattgtcagcctgtttcccaagtgcttccacaaaccattaaataattccacaaaccattaaaataattaatgctagggaattttaggaaaacattggtttacaatcagaaggaccggggaagtgggtcttcagccttcacgatgactacaagccatttaagggactagaattgctactgttgtcagagcaatttaggagtctgtatttgagcacccgcatagtgttccagaatgacatatctgactgtaacctggacacgtgtgatatgttgtctcccctgcagatgagcatttgaaatctcaaccctcgtatttctacgagtgcaggcctataatggaccctgggcacattttttttttttttgagatgcagtctcgctctgtttcccaggctggagtgcagtggcacgatatggctcactgcaacctccacctcctgggttcaagagattctcctgcctcagcctcctgagtagctgggactataggcgcacgccaccatgcctggctagtttttgcattttcagtagagacagagtttcaccatgttggccaggatggtctcgatttcctgacctcttgatccacccgcctcggcctcccaaagtgctgggattacaggcgtgaggcaccgcgcccgacccctggacacattttgacttagaacatattttcggtttgtgtgagacagtgcattagtgcaggattggaaaagagtgatcaggaattgattgttttcaaggattggttccttctgctcaaggaagtcccattgtaaacataaaaaaatgaatgaaactgaagaagttcagtgacttagctttttattatcttctgtagtacttacctttttggagaggagttggttgggatatttttccatttaaattttttttttaaagggatcttctctcccgtaagccgggatacttaagctatatatgtagtggctacaaattaaggtcttcactgttttcatttttagctgctagaataagtgaacattaccttagatagactcttctaattatgaagatatctagatgtctagaaaatatcaaaatgcatgtggtttttgcatttctaaaatacttttaaaaccaaatactttttcttttttttttttttctgagatggagtcttgctcttttgcctag

SEQ ID NO: 757 - DNA, 4055 bp, Homo sapiens
tgaatctgcccttcaaggtggctacaaaggtatctttgtcaaggtaggagaccttgtggcctccacgtgcacttccagggcctgcttgggcctcttctacgggtctgtcctgagtcttctatgaatctgcccttcagggcagattcatatttagactcttcacagtttgacctgagttttggccagaataaggtgacatttagtttgttggcttgatggatgacttaaatatttagacatatggtgtgtaggcctgcattcctactcttgcctttttttttgcccctccagtgttttgggtagttttgctcccctacagccaaaggcaaacagataagttggaggtctggagtggctacataattttacacgactgcaattctctggctgcacttcacaaatgtatacaaactaaatacaagtcctgtgtttttatcacagggaggctgatcaatataatgaaattaaaagggggctggtccatattgttctgtgtttttgtttgtttgtttctttttttgtttttgtggcctccttcctctcaatttatgaagagaagcagtaagatgttcctctcgggtcctctgagggacctggggagctcaggctgggaatctccaaggcagtaggtcgcctatcaaaaatcaaagtccaggtttgtggggggaaaacaaaagcagcccattacccagaggactgtccgccttcccctcaccccagcctaggcctttgaaaggaaacaaaagacaagacaaaatgattggcgtcctgagggagattcagcctagagctctctctcccccaatccctccctccggctgaggaaactaacaaaggaaaaaaaaattgcggaaagcaggatttagaggaagcaaattccactggtgcccttggctgccgggaacgtggactagagagtctgcggcgcagccccgagcccagcgcttcccgcgcgtcttaggccggcgggcccgggcgggggaaggggacgcagaccgcggaccctaagacacctgctgtaccctccacccccaccccacccacctccccccaactccctagatgtgtcgtgggcggctgaacgtcgcccgtttaaggggcgggccccggctccacgtgctttctgctgagtgactgaactacataaacagaggccgggaacggggcggggaggagggagagcacaggctttgaccgatagtaacctctgcgctcggtgcagccgaatctataaaaggaactagtcccggcaaaaaccccgtaattgcgagcgagagtgagtggggccgggacccgcagagccgagccgacccttctctcccgggctgcggcagggcagggcggggagctccgcgcaccaacagagccggttctcagggcgctttgctccttgttttttccccggttctgttttctccccttctccggaaggcttgtcaaggggtaggagaaagagacgcaaacacaaaagtggaaaacaggtaagaggctctccagtgacttacttgggcgttattgttttgtttcgaggccaaggaggcttcgggaagtgctcggtttcggggactttgatccggagccccacatccccaccacttgcaactcagatgggaccggaggcggtgttaaatggggagacgatgtcctagtacgagctctggtgaccccaggactctgcgctgctgcgcttggggcttgcccgacggtggagaccggggagcatctctgggcgtggagacccgggcgcagtaccccgggctcagaggggtcgggggttcccgggcgtgctgagggcgctgctgccgggtggggagagctgcaggtccggcaccgagcgctgctttgttcggagggccctgagctggctagaaacccttctggttgcaggtcggccagtacctacggagacaaatgccagcactgagtcttcactcggttcttaagaagctggtctgttctgacctgggaattggctatatgctccccgggactggagcggcacagtcccggactgtgaatccgggaactcgagttggaggtgtcccaaacggtccgtggtgctattgctcactagaggccttgggtctttgtttgacctgaggggtagggaggtcctgcctacagtctccgtgcgctcagctgagctggtgtccctggcgcagagcgcggacgagttttgtttccttttctttttcttttttttctttcctttaagtctcggtctgtcgcccaggctggagtgcaatggaacgatctccgctcactgcaacctccgcctcccgggttcaagcgattctcctgcctcagcctcctgagtagctgggattacaggcgcgtcaccacatccagctaatttttgtatttttagtagagacggggtttcaacttgttggccaggctggtctcgaaccctcgacctcaggtgatccaccggcctcggcctccccaagtgctgggattataggcgtgagccaccgcgcgcggccgagttttgtttcttttaaaaacaagacttaggagagcctgcggagacccggaggtggggtgcccaatcctccctctcccacgttccctgcagccccatcttccagaccgttgctgctggtctctcggggcagcttctgcctgggcgcagatggggaagctgggccgaggtggtgccgtggaatgaccgggagtaaccccggcgggcggcgcagaactcggagctccgccgcggggctgggctgggctctgccgtgagggtgggggtgctgggcgcgcgggctgcggtggcccccggagactggcccgcagcgcctcctggccggaggacctaggaatcggccggctctactaggtgtctttgctcgcggttccgactgtgaatccggtgaagaccggtggttgcagacggggaggaactatgaggttgaggcgaaagcccgttttgtttttttttttttgtttttttggtttttttttttgttagcgtgtttgccaactcccaggccattggtaaagcaggaaggttcttggggcggcggacggtgccagggttatgtgtaggtgcctctttaggtatatcttttatcaaaaagaagcaaagaaataagattaaaaataaacaaagaaaaaagttgtctggcactggcagtaattggcctgcctttgcagcactgataccattagcttttaaaatccgacttttcattgacacttcaagaagagaatgggtagtatatacacattcatctcatagtggacaaatttcatatttaaaaaaaccttctgggtactgaaatcagcaagtcacttgccctccatggccgaatccctgcttcccacgaagagaacctcacaaaaatttcccccaagttaaagagtggaattttcttgatttttttttcttttttttttaacggccgtagtttagaacccagacttaaattatgatcttcttttcaaacaaaacttaaagtccttaagttttcatctccccttttatttcaacctattcttctcatacctaccacaaaaataatggaggctttctgttgagaaactttccgtttctgttgagagtatcattctcttgagaaactttctcctaaatcagagaaagtatggaagcatggaaagtattcctgagtagaacctctacagatattacaatatttttcaaatacaaagtttccattgtcagcctgtttcccaagtgcttccacaaaccattaaataattccacaaaccattaaaataattaatgctagggaattttaggaaaacattggtttacaatcagaaggaccggggaagtgggtcttcagccttcacgatgactacaagccatttaagggactagaattgctactgttgtcagagcaatttaggagtctgtatttgagcacccgcatagtgttccagaatgacatatctgactgtaacctggacacgtgtgatatgttgtctcccctgcagatgagcatttgaaatctcaaccctcgtatttctacgagtgcaggcctataatggaccctgggcacattttttttttttttgagatgcagtctcgc

SEQ ID NO: 758 - DNA, 4046 bp, Homo sapiens
tatgggtctgtcctgagtgttgatagaaccactgatgtgagtacctgggcttgagccgtggcctggagatcctgttgactgtagcatggagggggcttgtgcagctgaatgtctgtatgcaggtggtgggagttctggaatatgatggagctggaggtgggaagagaagtaggcttggggcagctctctcatgccacctcattctggccaaaactcaggtcaaactgtgaagagtctaaatgtgaatctgcccttcaaggtggctacaaaggtatctttgtcaaggtaggagaccttgtggcctccacgtgcacttccagggcctgcttgggcctcttctacgggtctgtcctgagtcttctatgaatctgcccttcagggcagattcatatttagactcttcacagtttgacctgagttttggccagaataaggtgacatttagtttgttggcttgatggatgacttaaatatttagacatatggtgtgtaggcctgcattcctactcttgcctttttttttgcccctccagtgttttgggtagttttgctcccctacagccaaaggcaaacagataagttggaggtctggagtggctacataattttacacgactgcaattctctggctgcacttcacaaatgtatacaaactaaatacaagtcctgtgtttttatcacagggaggctgatcaatataatgaaattaaaagggggctggtccatattgttctgtgtttttgtttgtttgtttctttttttgtttttgtggcctccttcctctcaatttatgaagagaagcagtaagatgttcctctcgggtcctctgagggacctggggagctcaggctgggaatctccaaggcagtaggtcgcctatcaaaaatcaaagtccaggtttgtggggggaaaacaaaagcagcccattacccagaggactgtccgccttcccctcaccccagcctaggcctttgaaaggaaacaaaagacaagacaaaatgattggcgtcctgagggagattcagcctagagctctctctcccccaatccctccctccggctgaggaaactaacaaaggaaaaaaaaattgcggaaagcaggatttagaggaagcaaattccactggtgcccttggctgccgggaacgtggactagagagtctgcggcgcagccccgagcccagcgcttcccgcgcgtcttaggccggcgggcccgggcgggggaaggggacgcagaccgcggaccctaagacacctgctgtaccctccacccccaccccacccacctccccccaactccctagatgtgtcgtgggcggctgaacgtcgcccgtttaaggggcgggccccggctccacgtgctttctgctgagtgactgaactacataaacagaggccgggaacggggcggggaggagggagagcacaggctttgaccgatagtaacctctgcgctcggtgcagccgaatctataaaaggaactagtcccggcaaaaaccccgtaattgcgagcgagagtgagtggggccgggacccgcagagccgagccgacccttctctcccgggctgcggcagggcagggcggggagctccgcgcaccaacagagccggttctcagggcgctttgctccttgttttttccccggttctgttttctccccttctccggaaggcttgtcaaggggtaggagaaagagacgcaaacacaaaagtggaaaacaggtaagaggctctccagtgacttacttgggcgttattgttttgtttcgaggccaaggaggcttcgggaagtgctcggtttcggggactttgatccggagccccacatccccaccacttgcaactcagatgggaccggaggcggtgttaaatggggagacgatgtcctagtacgagctctggtgaccccaggactctgcgctgctgcgcttggggcttgcccgacggtggagaccggggagcatctctgggcgtggagacccgggcgcagtaccccgggctcagaggggtcgggggttcccgggcgtgctgagggcgctgctgccgggtggggagagctgcaggtccggcaccgagcgctgctttgttcggagggccctgagctggctagaaacccttctggttgcaggtcggccagtacctacggagacaaatgccagcactgagtcttcactcggttcttaagaagctggtctgttctgacctgggaattggctatatgctccccgggactggagcggcacagtcccggactgtgaatccgggaactcgagttggaggtgtcccaaacggtccgtggtgctattgctcactagaggccttgggtctttgtttgacctgaggggtagggaggtcctgcctacagtctccgtgcgctcagctgagctggtgtccctggcgcagagcgcggacgagttttgtttccttttctttttcttttttttctttcctttaagtctcggtctgtcgcccaggctggagtgcaatggaacgatctccgctcactgcaacctccgcctcccgggttcaagcgattctcctgcctcagcctcctgagtagctgggattacaggcgcgtcaccacatccagctaatttttgtatttttagtagagacggggtttcaacttgttggccaggctggtctcgaaccctcgacctcaggtgatccaccggcctcggcctccccaagtgctgggattataggcgtgagccaccgcgcgcggccgagttttgtttcttttaaaaacaagacttaggagagcctgcggagacccggaggtggggtgcccaatcctccctctcccacgttccctgcagccccatcttccagaccgttgctgctggtctctcggggcagcttctgcctgggcgcagatggggaagctgggccgaggtggtgccgtggaatgaccgggagtaaccccggcgggcggcgcagaactcggagctccgccgcggggctgggctgggctctgccgtgagggtgggggtgctgggcgcgcgggctgcggtggcccccggagactggcccgcagcgcctcctggccggaggacctaggaatcggccggctctactaggtgtctttgctcgcggttccgactgtgaatccggtgaagaccggtggttgcagacggggaggaactatgaggttgaggcgaaagcccgttttgtttttttttttttgtttttttggtttttttttttgttagcgtgtttgccaactcccaggccattggtaaagcaggaaggttcttggggcggcggacggtgccagggttatgtgtaggtgcctctttaggtatatcttttatcaaaaagaagcaaagaaataagattaaaaataaacaaagaaaaaagttgtctggcactggcagtaattggcctgcctttgcagcactgataccattagcttttaaaatccgacttttcattgacacttcaagaagagaatgggtagtatatacacattcatctcatagtggacaaatttcatatttaaaaaaaccttctgggtactgaaatcagcaagtcacttgccctccatggccgaatccctgcttcccacgaagagaacctcacaaaaatttcccccaagttaaagagtggaattttcttgatttttttttcttttttttttaacggccgtagtttagaacccagacttaaattatgatcttcttttcaaacaaaacttaaagtccttaagttttcatctccccttttatttcaacctattcttctcatacctaccacaaaaataatggaggctttctgttgagaaactttccgtttctgttgagagtatcattctcttgagaaactttctcctaaatcagagaaagtatggaagcatggaaagtattcctgagtagaacctctacagatattacaatatttttcaaatacaaagtttccattgtcagcctgtttcccaagtgcttccacaaaccattaaataattccacaaaccattaaaataattaatgctagggaattttaggaaaacattggtttacaatcagaaggaccggggaagtgggtc

SEQ ID NO: 759 - DNA, 4048 bp, Homo sapiens
ttggcctcccaaagtgctgggattacaggcatgagccactgcgcccagctcagatccatccctttctaagggcaaacagtccatggtgcaaaggggccatgccacccagagttatgagtacctgggactccagaattccttgcctggtggcctccacatgcacttccagggcctgcttgggcctcttctatgggtctgtcctgagtgttgatagaaccactgatgtgagtacctgggcttgagccgtggcctggagatcctgttgactgtagcatggagggggcttgtgcagctgaatgtctgtatgcaggtggtgggagttctggaatatgatggagctggaggtgggaagagaagtaggcttggggcagctctctcatgccacctcattctggccaaaactcaggtcaaactgtgaagagtctaaatgtgaatctgcccttcaaggtggctacaaaggtatctttgtcaaggtaggagaccttgtggcctccacgtgcacttccagggcctgcttgggcctcttctacgggtctgtcctgagtcttctatgaatctgcccttcagggcagattcatatttagactcttcacagtttgacctgagttttggccagaataaggtgacatttagtttgttggcttgatggatgacttaaatatttagacatatggtgtgtaggcctgcattcctactcttgcctttttttttgcccctccagtgttttgggtagttttgctcccctacagccaaaggcaaacagataagttggaggtctggagtggctacataattttacacgactgcaattctctggctgcacttcacaaatgtatacaaactaaatacaagtcctgtgtttttatcacagggaggctgatcaatataatgaaattaaaagggggctggtccatattgttctgtgtttttgtttgtttgtttctttttttgtttttgtggcctccttcctctcaatttatgaagagaagcagtaagatgttcctctcgggtcctctgagggacctggggagctcaggctgggaatctccaaggcagtaggtcgcctatcaaaaatcaaagtccaggtttgtggggggaaaacaaaagcagcccattacccagaggactgtccgccttcccctcaccccagcctaggcctttgaaaggaaacaaaagacaagacaaaatgattggcgtcctgagggagattcagcctagagctctctctcccccaatccctccctccggctgaggaaactaacaaaggaaaaaaaaattgcggaaagcaggatttagaggaagcaaattccactggtgcccttggctgccgggaacgtggactagagagtctgcggcgcagccccgagcccagcgcttcccgcgcgtcttaggccggcgggcccgggcgggggaaggggacgcagaccgcggaccctaagacacctgctgtaccctccacccccaccccacccacctccccccaactccctagatgtgtcgtgggcggctgaacgtcgcccgtttaaggggcgggccccggctccacgtgctttctgctgagtgactgaactacataaacagaggccgggaacggggcggggaggagggagagcacaggctttgaccgatagtaacctctgcgctcggtgcagccgaatctataaaaggaactagtcccggcaaaaaccccgtaattgcgagcgagagtgagtggggccgggacccgcagagccgagccgacccttctctcccgggctgcggcagggcagggcggggagctccgcgcaccaacagagccggttctcagggcgctttgctccttgttttttccccggttctgttttctccccttctccggaaggcttgtcaaggggtaggagaaagagacgcaaacacaaaagtggaaaacaggtaagaggctctccagtgacttacttgggcgttattgttttgtttcgaggccaaggaggcttcgggaagtgctcggtttcggggactttgatccggagccccacatccccaccacttgcaactcagatgggaccggaggcggtgttaaatggggagacgatgtcctagtacgagctctggtgaccccaggactctgcgctgctgcgcttggggcttgcccgacggtggagaccggggagcatctctgggcgtggagacccgggcgcagtaccccgggctcagaggggtcgggggttcccgggcgtgctgagggcgctgctgccgggtggggagagctgcaggtccggcaccgagcgctgctttgttcggagggccctgagctggctagaaacccttctggttgcaggtcggccagtacctacggagacaaatgccagcactgagtcttcactcggttcttaagaagctggtctgttctgacctgggaattggctatatgctccccgggactggagcggcacagtcccggactgtgaatccgggaactcgagttggaggtgtcccaaacggtccgtggtgctattgctcactagaggccttgggtctttgtttgacctgaggggtagggaggtcctgcctacagtctccgtgcgctcagctgagctggtgtccctggcgcagagcgcggacgagttttgtttccttttctttttcttttttttctttcctttaagtctcggtctgtcgcccaggctggagtgcaatggaacgatctccgctcactgcaacctccgcctcccgggttcaagcgattctcctgcctcagcctcctgagtagctgggattacaggcgcgtcaccacatccagctaatttttgtatttttagtagagacggggtttcaacttgttggccaggctggtctcgaaccctcgacctcaggtgatccaccggcctcggcctccccaagtgctgggattataggcgtgagccaccgcgcgcggccgagttttgtttcttttaaaaacaagacttaggagagcctgcggagacccggaggtggggtgcccaatcctccctctcccacgttccctgcagccccatcttccagaccgttgctgctggtctctcggggcagcttctgcctgggcgcagatggggaagctgggccgaggtggtgccgtggaatgaccgggagtaaccccggcgggcggcgcagaactcggagctccgccgcggggctgggctgggctctgccgtgagggtgggggtgctgggcgcgcgggctgcggtggcccccggagactggcccgcagcgcctcctggccggaggacctaggaatcggccggctctactaggtgtctttgctcgcggttccgactgtgaatccggtgaagaccggtggttgcagacggggaggaactatgaggttgaggcgaaagcccgttttgtttttttttttttgtttttttggtttttttttttgttagcgtgtttgccaactcccaggccattggtaaagcaggaaggttcttggggcggcggacggtgccagggttatgtgtaggtgcctctttaggtatatcttttatcaaaaagaagcaaagaaataagattaaaaataaacaaagaaaaaagttgtctggcactggcagtaattggcctgcctttgcagcactgataccattagcttttaaaatccgacttttcattgacacttcaagaagagaatgggtagtatatacacattcatctcatagtggacaaatttcatatttaaaaaaaccttctgggtactgaaatcagcaagtcacttgccctccatggccgaatccctgcttcccacgaagagaacctcacaaaaatttcccccaagttaaagagtggaattttcttgatttttttttcttttttttttaacggccgtagtttagaacccagacttaaattatgatcttcttttcaaacaaaacttaaagtccttaagttttcatctccccttttatttcaacctattcttctcatacctaccacaaaaataatggaggctttctgttgagaaactttccgtttctgttgagagtatcattctcttgagaaactttctcctaaatcagagaaagtatggaagcatgga

SEQ ID NO: 760 - DNA, 4041 bp, Homo sapiens
ctttctgagatccatccctttctttttatttttcttgacacggagtcttgctctgtcactcaggctggagtgcagtggcatgatctcgactcactgtaacctctgcctcccgggttcaagcgattctcctgcctcagcctcctgagataacaggcgctcgccaccacatctggctaatttttgtatttttagtaaagactgggtttcatcatgttggccaggttggtttcgaactcctgacctgaggtgagctgcccaccttggcctcccaaagtgctgggattacaggcatgagccactgcgcccagctcagatccatccctttctaagggcaaacagtccatggtgcaaaggggccatgccacccagagttatgagtacctgggactccagaattccttgcctggtggcctccacatgcacttccagggcctgcttgggcctcttctatgggtctgtcctgagtgttgatagaaccactgatgtgagtacctgggcttgagccgtggcctggagatcctgttgactgtagcatggagggggcttgtgcagctgaatgtctgtatgcaggtggtgggagttctggaatatgatggagctggaggtgggaagagaagtaggcttggggcagctctctcatgccacctcattctggccaaaactcaggtcaaactgtgaagagtctaaatgtgaatctgcccttcaaggtggctacaaaggtatctttgtcaaggtaggagaccttgtggcctccacgtgcacttccagggcctgcttgggcctcttctacgggtctgtcctgagtcttctatgaatctgcccttcagggcagattcatatttagactcttcacagtttgacctgagttttggccagaataaggtgacatttagtttgttggcttgatggatgacttaaatatttagacatatggtgtgtaggcctgcattcctactcttgcctttttttttgcccctccagtgttttgggtagttttgctcccctacagccaaaggcaaacagataagttggaggtctggagtggctacataattttacacgactgcaattctctggctgcacttcacaaatgtatacaaactaaatacaagtcctgtgtttttatcacagggaggctgatcaatataatgaaattaaaagggggctggtccatattgttctgtgtttttgtttgtttgtttctttttttgtttttgtggcctccttcctctcaatttatgaagagaagcagtaagatgttcctctcgggtcctctgagggacctggggagctcaggctgggaatctccaaggcagtaggtcgcctatcaaaaatcaaagtccaggtttgtggggggaaaacaaaagcagcccattacccagaggactgtccgccttcccctcaccccagcctaggcctttgaaaggaaacaaaagacaagacaaaatgattggcgtcctgagggagattcagcctagagctctctctcccccaatccctccctccggctgaggaaactaacaaaggaaaaaaaaattgcggaaagcaggatttagaggaagcaaattccactggtgcccttggctgccgggaacgtggactagagagtctgcggcgcagccccgagcccagcgcttcccgcgcgtcttaggccggcgggcccgggcgggggaaggggacgcagaccgcggaccctaagacacctgctgtaccctccacccccaccccacccacctccccccaactccctagatgtgtcgtgggcggctgaacgtcgcccgtttaaggggcgggccccggctccacgtgctttctgctgagtgactgaactacataaacagaggccgggaacggggcggggaggagggagagcacaggctttgaccgatagtaacctctgcgctcggtgcagccgaatctataaaaggaactagtcccggcaaaaaccccgtaattgcgagcgagagtgagtggggccgggacccgcagagccgagccgacccttctctcccgggctgcggcagggcagggcggggagctccgcgcaccaacagagccggttctcagggcgctttgctccttgttttttccccggttctgttttctccccttctccggaaggcttgtcaaggggtaggagaaagagacgcaaacacaaaagtggaaaacaggtaagaggctctccagtgacttacttgggcgttattgttttgtttcgaggccaaggaggcttcgggaagtgctcggtttcggggactttgatccggagccccacatccccaccacttgcaactcagatgggaccggaggcggtgttaaatggggagacgatgtcctagtacgagctctggtgaccccaggactctgcgctgctgcgcttggggcttgcccgacggtggagaccggggagcatctctgggcgtggagacccgggcgcagtaccccgggctcagaggggtcgggggttcccgggcgtgctgagggcgctgctgccgggtggggagagctgcaggtccggcaccgagcgctgctttgttcggagggccctgagctggctagaaacccttctggttgcaggtcggccagtacctacggagacaaatgccagcactgagtcttcactcggttcttaagaagctggtctgttctgacctgggaattggctatatgctccccgggactggagcggcacagtcccggactgtgaatccgggaactcgagttggaggtgtcccaaacggtccgtggtgctattgctcactagaggccttgggtctttgtttgacctgaggggtagggaggtcctgcctacagtctccgtgcgctcagctgagctggtgtccctggcgcagagcgcggacgagttttgtttccttttctttttcttttttttctttcctttaagtctcggtctgtcgcccaggctggagtgcaatggaacgatctccgctcactgcaacctccgcctcccgggttcaagcgattctcctgcctcagcctcctgagtagctgggattacaggcgcgtcaccacatccagctaatttttgtatttttagtagagacggggtttcaacttgttggccaggctggtctcgaaccctcgacctcaggtgatccaccggcctcggcctccccaagtgctgggattataggcgtgagccaccgcgcgcggccgagttttgtttcttttaaaaacaagacttaggagagcctgcggagacccggaggtggggtgcccaatcctccctctcccacgttccctgcagccccatcttccagaccgttgctgctggtctctcggggcagcttctgcctgggcgcagatggggaagctgggccgaggtggtgccgtggaatgaccgggagtaaccccggcgggcggcgcagaactcggagctccgccgcggggctgggctgggctctgccgtgagggtgggggtgctgggcgcgcgggctgcggtggcccccggagactggcccgcagcgcctcctggccggaggacctaggaatcggccggctctactaggtgtctttgctcgcggttccgactgtgaatccggtgaagaccggtggttgcagacggggaggaactatgaggttgaggcgaaagcccgttttgtttttttttttttgtttttttggtttttttttttgttagcgtgtttgccaactcccaggccattggtaaagcaggaaggttcttggggcggcggacggtgccagggttatgtgtaggtgcctctttaggtatatcttttatcaaaaagaagcaaagaaataagattaaaaataaacaaagaaaaaagttgtctggcactggcagtaattggcctgcctttgcagcactgataccattagcttttaaaatccgacttttcattgacacttcaagaagagaatgggtagtatatacacattcatctcatagtggacaaatttcatatttaaaaaaaccttctgggtactgaaatcagcaagtcacttgccctccatggccgaatccctgcttcccacgaagagaacctcacaaaaatttcc

SEQ ID NO: 761 - DNA, 77 bp, Homo sapiens
tccctgagggtgggaggggagacccagatcaggccagctgtgggctgagatctgagccgaaaggccaagcttggagg

SEQ ID NO: 762 - DNA, 42 bp, Homo sapiens
tggtggtagggcaggttgggggcataagagttggaacaagcg

SEQ ID NO: 763 - DNA, 42 bp, Homo sapiens
gggagactggggaccatggaaacatgggacagctcccacgaa

SEQ ID NO: 764 - DNA, 59 bp, Homo sapiens
gctctcctttcccagaaaaaaaaagggtggaagagtcagtgtattcaaggtctctctct

SEQ ID NO: 765 - DNA, 39 bp, Homo sapiens
ttcaaccaataactgtatgccttcttatgaaatgttttt

SEQ ID NO: 766 - DNA, 46 bp, Homo sapiens
gctccatatggaagtatttgttgtttttatatttttcttgactagt

SEQ ID NO: 767 - DNA, 41 bp, Homo sapiens
ggaaatgcaagtccaaagaaatcctggacaggcttcaggtc

SEQ ID NO: 768 - DNA, 42 bp, Homo sapiens
ccacggccatggcgaagaggtttcgtcccaccaagtcccaag

SEQ ID NO: 769 - DNA, 42 bp, Homo sapiens
tacctaaactcattcacccagatcttgttctttaagctgcag

SEQ ID NO: 770 - DNA, 39 bp, Homo sapiens
gtacatccagggctgaagttccaggctggggtacttgcc

SEQ ID NO: 771 - DNA, 50 bp, Homo sapiens
acacctgggaaagtgaccagaaactcacctctccagtatcaagcaggcac

SEQ ID NO: 772 - DNA, 44 bp, Homo sapiens
taagtctgtcatggaaatgaaggcttccttgggtcaacttgcaa

SEQ ID NO: 773 - DNA, 45 bp, Homo sapiens
caagactatgcagcaatgtttttgtggcttcagccagctccttgc

SEQ ID NO: 774 - DNA, 63 bp, Homo sapiens
gctgaactatctcaatcaggtacagttcccctaaatgccaccttctcttccctctcctctctg

SEQ ID NO: 775 - DNA, 46 bp, Homo sapiens
accttgtggagaatgacatcagccctcagcatcttgtccacagtag

SEQ ID NO: 776 - DNA, 51 bp, Homo sapiens
tgcaaggatggatataggtggaagatgacctggacgaaagaccaatcattc

SEQ ID NO: 777 - DNA, 68 bp, Homo sapiens
gtcctgctttccaggccattcagtgttccttcagttctctgagcatagaggacaaggaaggtgggagg

SEQ ID NO: 778 - DNA, 48 bp, Homo sapiens
ctacctgaagaccagagaggcagaaaaatgagagaggacagctggaag

SEQ ID NO: 779 - DNA, 74 bp, Homo sapiens
ttatgtaacccaaccaaatactcaaaggaccaaaagattctcccctttcaatgccaggagacactggcactgta

SEQ ID NO: 780 - DNA, 58 bp, Homo sapiens
gaagaacagtatctcataagcttgtgggtctcgtaggggtatggactgagctgcttag

SEQ ID NO: 781 - DNA, 41 bp, Homo sapiens
cattaggggcttttggagagccaggtggctcccagggctgc

SEQ ID NO: 782 - DNA, 40 bp, Homo sapiens
cgccgtggctggtcattaactgaaagataaagcaggaggg

SEQ ID NO: 783 - DNA, 4077 bp, Homo sapiens
gggcgggatgggagtagtgggagggggatactggccttgtgagaagaaaagggaagtgtctgtttgagaggtttttgaattagtaaaggaggacaggcgcaaactccaagcgcttcacttgcacccgggaccaaaccccaatcccagtggctggctccctgaggccgccccgctccgtcccgccccgctgacagcggctgggctggagaaggctctatacggacacacctctggggacggggaacccactgctcccagctaaagcaaccctgtttcctggcccgcctcagacagggctgcaggccttgtttgagcccctttcagggcacctggccttggattgtctgtggctttgcctggtccgctgtgacttcctttctacttgagccttgctaaggcagactctactccctcactcgtaagcagccaggcgtccagcaggtcctccaacgtcgatcttggccctaagacgtccagtctgggcacggagttgttgagatccggcaggaagtccctgctccagggccaaaggccccacccgggctcccccggatgtccccgcacccccctctattctcccaaaagaaagaagctgcttcccactttggaaacgtttattctgagcaccgggaaggggggcggcggcgggcgcctcactgggtgttgagcttcttagtgtactcctcgagagcgctcaggaagctgaccttgaagctctccagcacgggcagcaggccttggcggaggtcctcgagcgcgggcttggccttctcgctgagcgtgctcagatgctcggtggccttggcgtggtactcggccagtctggcgccgccgttctccttgagagcctcaaggcgcgcggccaagcgctggcgcagctcgtcgctgtagggggccagatgcgtgcgcagcgcgtccacatgggcgcgcgcgcggtcgcgcatctcctcgcccagtgggctcagcttctcttgcagctcgtgcagcttctggcgcgcgccctcttggagctctgcgcgcagcggctccaccttctggcggtagagctccatctcctcctgccacttcttctggaagtcgtccaggtagggctgcaccttggccttcacctcctccagatccttgctcatctcctgcctcaggccctctgtctccttttccaggttatcccagaactcctgggtcacagggccgagctgttcgcgcagcttgctgaaggtggaggtcacgctgtcccagttgtcaaggagctttaggctggagggtgagacagaagggttgagggctggcctcccagcgccccagcctatcaggggtgagccctgggtgacacctgtccgcggaggtgcagtggcctagcatttccagtacactctcaaccaacacccctgccccgccaggccatgccccgttgtgcagctggaccgaggcacagagaggagctaaaaaggagacagagctgggactagtgcccagttacgttggtctccaaagtgggcccttgaaggacctcgcttctatgcctccagcgcattctcctctccgaagacagcccacagtcttgctgggcaggagcagaggaggtggtgaagaagggaaaggggcttgctacacttgcaggcacaatgtggctctgtgatcacgcatcgggcagccctggtctgtcctttgcaggggacatgggctgtgaccctgcctggagatcccattccagtttctccatccagaccatctgtggggcccagctcatcagatattaggtgaggactcggccagtctggcttcaacatcatcccacaggcctctgccccctacccctgccctcaaccccaggctgggtccttactttagctgttttcccaaggcggagccttcaaactgggacacatagtctctgccgctgtctttgagcacatccacgtacacagtggccaggtccttcactcgatcccaggggctctgggggggttcatcttgctgccagaaatgccgagcctggctccctgagggtgggaggggagacccagatcaggccagctgtgggctgagatctgagccgaaaggccaagcttggaggtgggggagagggggccagtgagaaacctgctgcctctgcccaggagggtgggccacggggatttagggagaaagccccccgatggttggctccctaggttaggggacacctacccgtcaggaagagcacggccaaggtcagcaccgcagctttcatcctgaagggccgtgggggacctggaggagaagaagggcctggctgagtggggtgccttcagcatgcagaagccccgtgctcccccactcattgcagccaggtgaggagaagggcacagagcgggagaagacctcaggtacccagaggcccggcctggggcaaggcctgaaccttgagctggggagccagagtgaccggggcaggcagcaggacgcacctccttctcgcagtctctaagcagccagctcttgcagggcctatttatgtctgcagccagggtctgggctgggaggctgataagcccagccccggccctgttgctgctcactggtcctggcaatgtggaacttaagagttcaaggatcagctctgtccctggggctgggcaaatagagtgggcaaacagcaagctgcgggggctgcagggcaggggtcaagggttcagtgggggcgggaggggagtgtctgcaggcttgcaggtctcccgggtggggtcggggttccctgcactcatccccttcccctccatgggagtgtgtgggcagttgccattgtccattgtgttggcagaggaggggaggggagggacgctgggactcctccaccaaggagactgcctcccccaccaccagcattccagggagactacttcactcccctcccccttcccccgccctgtcctcccaccagtgctcttctttagtccccagcaggtcctccaggcctctctccaagcctcccaaactggtaaacctggggagaggggagagccctccgtggctcccagactgaggtttcggagacctcttgcatttcaaaacactccagagatcaattcggagctgccaacttttaattttgtcatgtaaagatattgtccgcctccaaaaaaccctcaccatctacagtgaccatcacttcaaaaaggaaaggctttaacaaaaaagggcataatctcagaattacattacagaattgaagccccttagattgaagacgtctccctttgcattgttcacacttatatttgatcacgcacaggtgtgactggatctcagcccttgggaagccctggtgtggggagaagacctctgggcaaaggaagtggcaggagacctgctttctcatttcacttggcctccatcttgctggaggaagatcgtgggcaagttatataatctctctgagcctcggttttctatctgcaaaatggggcaagaatggtcagggttgttggaggcccctgagacagcctgtgaatgtaaagtgctgtgtgtccgttggtgtttgcagcaccatcttgtcaggtttctcctggaaggcccagacctcccccagcaggttactgataggacctgagtcctagagcctgtgatgcaggctgagaggaactgtgacatcactccagcctctccccatgccaccatctcacagatgaagagactgaagagcacagagggactttgcccagaggctgtcatctctcagggagttagaagaaaggctggacctagaacccagtctctggacttgggatgcagggcagaaatgtaccctgtaccatcactccaggaaactccctaacactagaaaccaggctgacatctctgtttaccagatcagggagtggtcggcctcatgcctttcacttcagagaagattctggagccagaaaacctcaaatctaagggtcaggcaggttcaaatccagctgcctgaccctggatgagttatgatacatcacctccccacacatcagtttctgattgaagataatgatagaatatgccatcgccctgagttatggcaggggttactgtgtggcaagcagaataacgctcccc

SEQ ID NO: 784 - DNA, 4042 bp, Homo sapiens
agactcacctagtcttgcatgacagcgtatacagactcagaggagttttagaaggcccttcttttttttttttttttttttgagacggagtctcgctctgtcgcccaggctggagtgcagtggcgggatctcggctcactgcaagctccgcctcccgggttcacgccattctcctgcctcagcctcccaagtagctgggactacaggcgcccgccactacgcccggctaattttttgtatttttagtagagacggggtttcaccgttttagccgggatggtctcgatctcctgacctcgtgatccacccgcctcggcctcccaaagtgctgggattacaggcgtgagccaccgcgcccggccagaaggcccttcttgagaaggctcttttcttctctaatctaaatggccctacagcaactttctagccgccctcatggacttgaaatctttcttttctctttgcaggagtgcagtggtgcgatcacagctcactgcagcctcaaactcctaggctcacatgatccttcagcctcagcctcctgagcagctgggactacaggcatgtgccaccaagcctggttattttttgtagaggtgggggtcttgctatgttgcccaggttggactccaactcctgggtttacctaattctcctgcctcagcctcctgagcagctgggattacaggcgcacgccaccatgcccagcttggaaggctttctaaattccctcctctcattcttccttctgtgaactcagatggtctttccagcttcagtaagctttcttcatagaagaccttcaaccacctgtctcttagccatgcctggaaacttgctggaaactctaccctgccctttggagttcaggtgtgggataaaggagaaaactataggaaaattccacccccgctccgctttttttttttttttgagatgtagtatcccgctgtcacccaggctagagtgcagtggtgcaatcttggcttgctgcagtaacctctgcctcctgggttcaagccattctcctgtctcagcctcctgagtagcagggactacaggcacctgccaccacacctggctaatttttgtatttttagtagacacggggttttgccacattggccaggctggtctcaaactcctgacctcagatgatccacccccatcggcctccagaagtgctggatttacaggcgtgagccatgccaggcccctccctttctttccaaatacttatttggctatcctttcactcggccaatgggggtcacgtcatgaagggtccagcctgtgtccactctttaaggatccttccctgtactcttcaaaagtgccctttcaaggaagctgttttccacctggcccagcaaattcaaatgctcccttctgacagggcagagtccgagctgggtgcccagggacacagtgtgaagcagagttcaggcttctagagaatgcgagtttcttaagtcactcaaagccccacccttagcctgggagacctctccagcctccactgctccagctcccacctacctgaggcttcttccaactagactccaaaccacaggcaaataatctatcagcctaagaacacaatcaggctcctatctacacaacttcctgctgtccaactaagtaaccaagttgtaagtaagtgcctcacaaaaggaaggacaaaaggcaggacaaaaggtcttagcaacttgagtctggagattttttttttaatcctttttagttcaacataaaatgagaaagaaaaaaatatttctgacattttcaaagaacagaaataggaaagtatgttcatatacattcaacgtatactgcacatattggttactacaatacaaagcaatgagttttttttaaagtgtagtttgcaagatggcacggttagtaggctcactggctttcatctgttgttgctggagggtgcagtctgctctcccatacatacagtaccatgtaaacacatcaggctgagcgcgtggtggtggtagggcaggttgggggcataagagttggaacaagcgcagataagtcaacagctttttagggctttcttggtaagcccccttctggtgagtagttggtgaccccaccaagtggaggggagactggggaccatggaaacatgggacagctcccacgaagggctcttgcactgcagaattccactcaagggatcttgggtccaggagccgagctgccagtatcagtggagaaggacaaggtgcatggggatcccgccagcaacatcaggatggccatgccgggcacccgctttcctctgtgcaaattcaggatgaaagactaggaggggactcgggacctcttgctctcctttcccagaaaaaaaaagggtggaagagtcagtgtattcaaggtctctctcttgttttgaagatcagaaggagataacccagaccctctctcagccccagccagcagagaagactttggtttctaacaatgaagagaaataaagataacacaaataatagctactgcgtatgcactgcttcaactggggaaaggagaccactgcatctgtcactggcacaagtaagagctgttcacaattacaatgcctaaaggaaatactttgaacaaaaggtgcaagtcacaattcaaatagaacagaatctggttaaacatttctcatttaaacaaaaattccttttctctttatttattaataatgataataacaataatatcaacatttaccaaaaacaatttctacatgatcaagaattaaaatataggggctgagggtacccagtggggaagaggaggttaggagagaggcagggcccaaggcaacctcctacacttcttccctgtgacaaagaggctgaaagaggagagcatatatatatatattttatatatatattatatatataatatatatataatatattatattatatattatatatataatatatatatacacatatattatattatatatatacacacatatataatatatatatggagaaacaatcctttttatagcacaatataaaatgagaatgaaagatgccatagaaagcatagtgcactgctgttgggtgttcagtccatggataaaaccagcaggatgataaaggcaaccaactttccaggttacaagaggggagctgagttatccaccaaaagcaaaggctcaaattgagacatcctaactggcaaaccatctatgccaggtcattctcagcctccgtgccaaactcttcatatgatcttggctaggacagacatgttttccgtggatcccagcagtaaagacctctctgcgttccaggcttgggggtttctctttttttgttctttttgttttctaagtgccagaagccgtcacccttcctctctccctttgcctgccattaggattccagaggatggcatcctttagtatttgctttcacagaagagcaatgcagggggatggagggtgctctgctgatgaaggctagggagggagtggccctgaggccgctggcctctgaactctaactgctttgctctcctgtttcaaaaaaggaacgaaagaaaaaaaagaaaggaagaaaaaaaagaaagtatatcacctctggaagaaaacataccaaaaacaaaacaaaacacaaacccccaaacaaaacaaaaaaccaccaactcaaatatactttcacaaaagatggagaacatggatttccttcctgtttatttccttggtgacttggtcatacaagcaaacatggcaaaaccctctcagaacccaaaagaacagcacacggatgaaccaaatgtgaggaaagcagctgtgatattttgggtggagagaaacacaagggcaatttggcacaacgctgctagatactgtgggtttacaatcaaccttttcattcccaagctgtacacaaaacctggaataaagcagacacagaggagaattagtttgaaaagagaaaggctcaaatattccatttaaaaccttttaaaaaatgcaacgggtttactttccctcaggtgttcaggt

SEQ ID NO: 785 - DNA, 4042 bp, Homo sapiens
tggcgggatctcggctcactgcaagctccgcctcccgggttcacgccattctcctgcctcagcctcccaagtagctgggactacaggcgcccgccactacgcccggctaattttttgtatttttagtagagacggggtttcaccgttttagccgggatggtctcgatctcctgacctcgtgatccacccgcctcggcctcccaaagtgctgggattacaggcgtgagccaccgcgcccggccagaaggcccttcttgagaaggctcttttcttctctaatctaaatggccctacagcaactttctagccgccctcatggacttgaaatctttcttttctctttgcaggagtgcagtggtgcgatcacagctcactgcagcctcaaactcctaggctcacatgatccttcagcctcagcctcctgagcagctgggactacaggcatgtgccaccaagcctggttattttttgtagaggtgggggtcttgctatgttgcccaggttggactccaactcctgggtttacctaattctcctgcctcagcctcctgagcagctgggattacaggcgcacgccaccatgcccagcttggaaggctttctaaattccctcctctcattcttccttctgtgaactcagatggtctttccagcttcagtaagctttcttcatagaagaccttcaaccacctgtctcttagccatgcctggaaacttgctggaaactctaccctgccctttggagttcaggtgtgggataaaggagaaaactataggaaaattccacccccgctccgctttttttttttttttgagatgtagtatcccgctgtcacccaggctagagtgcagtggtgcaatcttggcttgctgcagtaacctctgcctcctgggttcaagccattctcctgtctcagcctcctgagtagcagggactacaggcacctgccaccacacctggctaatttttgtatttttagtagacacggggttttgccacattggccaggctggtctcaaactcctgacctcagatgatccacccccatcggcctccagaagtgctggatttacaggcgtgagccatgccaggcccctccctttctttccaaatacttatttggctatcctttcactcggccaatgggggtcacgtcatgaagggtccagcctgtgtccactctttaaggatccttccctgtactcttcaaaagtgccctttcaaggaagctgttttccacctggcccagcaaattcaaatgctcccttctgacagggcagagtccgagctgggtgcccagggacacagtgtgaagcagagttcaggcttctagagaatgcgagtttcttaagtcactcaaagccccacccttagcctgggagacctctccagcctccactgctccagctcccacctacctgaggcttcttccaactagactccaaaccacaggcaaataatctatcagcctaagaacacaatcaggctcctatctacacaacttcctgctgtccaactaagtaaccaagttgtaagtaagtgcctcacaaaaggaaggacaaaaggcaggacaaaaggtcttagcaacttgagtctggagattttttttttaatcctttttagttcaacataaaatgagaaagaaaaaaatatttctgacattttcaaagaacagaaataggaaagtatgttcatatacattcaacgtatactgcacatattggttactacaatacaaagcaatgagttttttttaaagtgtagtttgcaagatggcacggttagtaggctcactggctttcatctgttgttgctggagggtgcagtctgctctcccatacatacagtaccatgtaaacacatcaggctgagcgcgtggtggtggtagggcaggttgggggcataagagttggaacaagcgcagataagtcaacagctttttagggctttcttggtaagcccccttctggtgagtagttggtgaccccaccaagtggaggggagactggggaccatggaaacatgggacagctcccacgaagggctcttgcactgcagaattccactcaagggatcttgggtccaggagccgagctgccagtatcagtggagaaggacaaggtgcatggggatcccgccagcaacatcaggatggccatgccgggcacccgctttcctctgtgcaaattcaggatgaaagactaggaggggactcgggacctcttgctctcctttcccagaaaaaaaaagggtggaagagtcagtgtattcaaggtctctctcttgttttgaagatcagaaggagataacccagaccctctctcagccccagccagcagagaagactttggtttctaacaatgaagagaaataaagataacacaaataatagctactgcgtatgcactgcttcaactggggaaaggagaccactgcatctgtcactggcacaagtaagagctgttcacaattacaatgcctaaaggaaatactttgaacaaaaggtgcaagtcacaattcaaatagaacagaatctggttaaacatttctcatttaaacaaaaattccttttctctttatttattaataatgataataacaataatatcaacatttaccaaaaacaatttctacatgatcaagaattaaaatataggggctgagggtacccagtggggaagaggaggttaggagagaggcagggcccaaggcaacctcctacacttcttccctgtgacaaagaggctgaaagaggagagcatatatatatatattttatatatatattatatatataatatatatataatatattatattatatattatatatataatatatatatacacatatattatattatatatatacacacatatataatatatatatggagaaacaatcctttttatagcacaatataaaatgagaatgaaagatgccatagaaagcatagtgcactgctgttgggtgttcagtccatggataaaaccagcaggatgataaaggcaaccaactttccaggttacaagaggggagctgagttatccaccaaaagcaaaggctcaaattgagacatcctaactggcaaaccatctatgccaggtcattctcagcctccgtgccaaactcttcatatgatcttggctaggacagacatgttttccgtggatcccagcagtaaagacctctctgcgttccaggcttgggggtttctctttttttgttctttttgttttctaagtgccagaagccgtcacccttcctctctccctttgcctgccattaggattccagaggatggcatcctttagtatttgctttcacagaagagcaatgcagggggatggagggtgctctgctgatgaaggctagggagggagtggccctgaggccgctggcctctgaactctaactgctttgctctcctgtttcaaaaaaggaacgaaagaaaaaaaagaaaggaagaaaaaaaagaaagtatatcacctctggaagaaaacataccaaaaacaaaacaaaacacaaacccccaaacaaaacaaaaaaccaccaactcaaatatactttcacaaaagatggagaacatggatttccttcctgtttatttccttggtgacttggtcatacaagcaaacatggcaaaaccctctcagaacccaaaagaacagcacacggatgaaccaaatgtgaggaaagcagctgtgatattttgggtggagagaaacacaagggcaatttggcacaacgctgctagatactgtgggtttacaatcaaccttttcattcccaagctgtacacaaaacctggaataaagcagacacagaggagaattagtttgaaaagagaaaggctcaaatattccatttaaaaccttttaaaaaatgcaacgggtttactttccctcaggtgttcaggtagcttgccatactgaggctctgatgtggatttgccaagtggcttccctttcatcaggcctcttctgtcaaggattttccagatacaaccaatggtgcctgctgtgtactctttgcattac

SEQ ID NO: 786 - DNA, 4059 bp, Homo sapiens
gccaccgcgcccggccagaaggcccttcttgagaaggctcttttcttctctaatctaaatggccctacagcaactttctagccgccctcatggacttgaaatctttcttttctctttgcaggagtgcagtggtgcgatcacagctcactgcagcctcaaactcctaggctcacatgatccttcagcctcagcctcctgagcagctgggactacaggcatgtgccaccaagcctggttattttttgtagaggtgggggtcttgctatgttgcccaggttggactccaactcctgggtttacctaattctcctgcctcagcctcctgagcagctgggattacaggcgcacgccaccatgcccagcttggaaggctttctaaattccctcctctcattcttccttctgtgaactcagatggtctttccagcttcagtaagctttcttcatagaagaccttcaaccacctgtctcttagccatgcctggaaacttgctggaaactctaccctgccctttggagttcaggtgtgggataaaggagaaaactataggaaaattccacccccgctccgctttttttttttttttgagatgtagtatcccgctgtcacccaggctagagtgcagtggtgcaatcttggcttgctgcagtaacctctgcctcctgggttcaagccattctcctgtctcagcctcctgagtagcagggactacaggcacctgccaccacacctggctaatttttgtatttttagtagacacggggttttgccacattggccaggctggtctcaaactcctgacctcagatgatccacccccatcggcctccagaagtgctggatttacaggcgtgagccatgccaggcccctccctttctttccaaatacttatttggctatcctttcactcggccaatgggggtcacgtcatgaagggtccagcctgtgtccactctttaaggatccttccctgtactcttcaaaagtgccctttcaaggaagctgttttccacctggcccagcaaattcaaatgctcccttctgacagggcagagtccgagctgggtgcccagggacacagtgtgaagcagagttcaggcttctagagaatgcgagtttcttaagtcactcaaagccccacccttagcctgggagacctctccagcctccactgctccagctcccacctacctgaggcttcttccaactagactccaaaccacaggcaaataatctatcagcctaagaacacaatcaggctcctatctacacaacttcctgctgtccaactaagtaaccaagttgtaagtaagtgcctcacaaaaggaaggacaaaaggcaggacaaaaggtcttagcaacttgagtctggagattttttttttaatcctttttagttcaacataaaatgagaaagaaaaaaatatttctgacattttcaaagaacagaaataggaaagtatgttcatatacattcaacgtatactgcacatattggttactacaatacaaagcaatgagttttttttaaagtgtagtttgcaagatggcacggttagtaggctcactggctttcatctgttgttgctggagggtgcagtctgctctcccatacatacagtaccatgtaaacacatcaggctgagcgcgtggtggtggtagggcaggttgggggcataagagttggaacaagcgcagataagtcaacagctttttagggctttcttggtaagcccccttctggtgagtagttggtgaccccaccaagtggaggggagactggggaccatggaaacatgggacagctcccacgaagggctcttgcactgcagaattccactcaagggatcttgggtccaggagccgagctgccagtatcagtggagaaggacaaggtgcatggggatcccgccagcaacatcaggatggccatgccgggcacccgctttcctctgtgcaaattcaggatgaaagactaggaggggactcgggacctcttgctctcctttcccagaaaaaaaaagggtggaagagtcagtgtattcaaggtctctctcttgttttgaagatcagaaggagataacccagaccctctctcagccccagccagcagagaagactttggtttctaacaatgaagagaaataaagataacacaaataatagctactgcgtatgcactgcttcaactggggaaaggagaccactgcatctgtcactggcacaagtaagagctgttcacaattacaatgcctaaaggaaatactttgaacaaaaggtgcaagtcacaattcaaatagaacagaatctggttaaacatttctcatttaaacaaaaattccttttctctttatttattaataatgataataacaataatatcaacatttaccaaaaacaatttctacatgatcaagaattaaaatataggggctgagggtacccagtggggaagaggaggttaggagagaggcagggcccaaggcaacctcctacacttcttccctgtgacaaagaggctgaaagaggagagcatatatatatatattttatatatatattatatatataatatatatataatatattatattatatattatatatataatatatatatacacatatattatattatatatatacacacatatataatatatatatggagaaacaatcctttttatagcacaatataaaatgagaatgaaagatgccatagaaagcatagtgcactgctgttgggtgttcagtccatggataaaaccagcaggatgataaaggcaaccaactttccaggttacaagaggggagctgagttatccaccaaaagcaaaggctcaaattgagacatcctaactggcaaaccatctatgccaggtcattctcagcctccgtgccaaactcttcatatgatcttggctaggacagacatgttttccgtggatcccagcagtaaagacctctctgcgttccaggcttgggggtttctctttttttgttctttttgttttctaagtgccagaagccgtcacccttcctctctccctttgcctgccattaggattccagaggatggcatcctttagtatttgctttcacagaagagcaatgcagggggatggagggtgctctgctgatgaaggctagggagggagtggccctgaggccgctggcctctgaactctaactgctttgctctcctgtttcaaaaaaggaacgaaagaaaaaaaagaaaggaagaaaaaaaagaaagtatatcacctctggaagaaaacataccaaaaacaaaacaaaacacaaacccccaaacaaaacaaaaaaccaccaactcaaatatactttcacaaaagatggagaacatggatttccttcctgtttatttccttggtgacttggtcatacaagcaaacatggcaaaaccctctcagaacccaaaagaacagcacacggatgaaccaaatgtgaggaaagcagctgtgatattttgggtggagagaaacacaagggcaatttggcacaacgctgctagatactgtgggtttacaatcaaccttttcattcccaagctgtacacaaaacctggaataaagcagacacagaggagaattagtttgaaaagagaaaggctcaaatattccatttaaaaccttttaaaaaatgcaacgggtttactttccctcaggtgttcaggtagcttgccatactgaggctctgatgtggatttgccaagtggcttccctttcatcaggcctcttctgtcaaggattttccagatacaaccaatggtgcctgctgtgtactctttgcattactccagccaaacaagccaatttccccattctttctaccatgggcctctcatcacacatttccctaatctggaatatcctgccacttgcttctgtatggccttaaaaaatatggctggacatattttcctgccaggttttgtcttttaggactgagtttaaggacttcctcctttcctcattatgctgaccggaggtcacctgcatcctctggagccgtagctcacttctgtcgctatgaaggct

SEQ ID NO: 787 - DNA, 4039 bp, Homo sapiens
aagtagttggtgttttccacacagaatatggagaactcaacagaggtacagttgtccatttgttctatgaagttgccatgtgtattagatcagttcgtctctctttttcattttggtacctgttttaatttttatctccaaatttttagagtttgttgtttataggattgaaaaaatctataagcatcttattttacatcttatttttttagaatgttaatactttatggagcctttttcaaatgctgaactggtgtttgttttttaacttttattttaggttcacggggtacatgtgaagatttgttacttaggtaaacccatgtcatgggggtttgttgtacagattatttaatcactcaggtattaagcccagtacccaattgttatcttttctaatcctctccctcctcccatcttccattctcaagtagaccccagtgtctgttgtttccttctttgtgttcataaattctcatcatttagctcccgtttataagtgagaacatgtggtatctggttttcttttcctctgttggtttgctgaggataatagcctctagctacatccatgttcccacaaaagttataatctggttcttttttatggctgcatggtattccatggtgtgtatgtaccacattttctttatccaatctgttgttggtgggcatataggttttcatgaaaagattccaagtttttgctattgtgaatagtgctgcagtgaacattcacgtgcacatgtctttatggtaaaatgatttatatttctctgggtatatatccagtaatgggattgttgggtcgaatggcagttctgcttttagctctttgaggaatcaccatactgctttccataatggttgaactaatttacactcccaccaacagggtgtaagtgttccctttttttcacaacctcaccagcatctgttattttttgactttttagtaacaggcattctgactggtgtgagatggtatctaattgtggtttatatttgcattctctaatgatcagtgatattgagcattttctcataagtttgttggtctcatatatgtcttctttagaaaagtgactattcatgccctttacctactttttaatgggattctttttttctcttataaacttgtttaagttccttatagaggctggatattaggcctttgtcagatgcgtagtttgcaaaaattttctcccattctggaggttgtctgtttactctgttgacagttttttttttgtttttttttttgctgtgcagaagctcttaagtgtaattagataccatttgtcaatttttgtttttatcatgattgtttttggtgtctttgtcattcaaaattaatatcattgacatagaaaattctcacattgttgcagcattttaaaaaatctgttactaagtataatatacactaagaccctaatttggtttactaattttttttaaaggaaacacaccatatgttgataaaggtttatctaggcagttaagattatactaacttttattttttctttgtatcacctaaattttctacagtaaacaattttttataatctgctttttttaaaaaataaaacatagtaggaagtcattaaactcgggtctagtcttaattgtgccttaagctgtgtttctttgcattctctcttcagccttatgtttccagtttaacttataaatttatcttccaaatttctgatccctctgaaatcttataactaacatatttagttttaccttttgattttgatttaaagaataagacaacatttctgattcactttttcaatatttcttatttgctattgccatatatttcagaaactacttgtggtttatttctgcagttcatgttctttggtggaatgagagtgcagatagtcgtgcagctgggagacataagtcccatgaggatcccagagttgtggcggctggtaagctgtttcactaagcacgaattatttttagaacaaatgtgattcaaccaataactgtatgccttcttatgaaatgtttttccagttcgggaaagtgtcaactacctagtttctcagcagaatatgcttctgattcctgcatcattttcaccattgaaatagttttctactgaaatacaaaacatttcattaactgctctaagatgtgtctgctaatggtgcttaaattctcccaagaggttctcgcttttatttgaaggaggtggtaagttaattagttaatttgctgtgcttcttgcatttttgaaagttacatattctccactgctttaagaaataattcagttcactttcaccttggcatttcagtatctgttacacattagaagtagttgtcactatttcatcatcttggtttttcatttgttttagaatacctcttctgtattttgataactcattgctttatagcattttcttttactcaaataaggattttacatttccttgcctgacagtatttttgaattatttatataaaatatctatcttttcatcatgtctatagttcctgagattttaaaaaaatttgcttagtaaaggttattttgtgatataaaatgggatttataaaaatattagattgtttatttctttactgtggaaaagtacaatgtcatctgtattaattattgcttttacattcattgattattagtcattctaacttggaaaataatgcaattgggtcacagtgttaaaaatctagaaaagacttgttggtttatatgctgaaattgttcatttataattaattttactaatttctacttagtttggatcactaacagagatcttgggacatttatttgttttaaagaaatatttatggttatggaaacgcttgccctaataaaaatcctgcatattcattgtttttttaaattcacattttatacttatatgatctctaaagctcttgctatgttgctataagacagtaatatagtgataatttaccaactttattgaaaatgttgttacatcaataaaatagcatgctgggaacctgagaaggaaggtttctttagtactgccacagatgtcctggagttttccttgaaacatctttcatttccattttacttgatgcctctacctactaaaactagatttggtacttccgatagtgtatatttacagctatattatatttacatttttacagactatcttctgataatctgtatttacagctatgttattttatatttttaaaatcttacagctataaaatagtaaattgtgaattagctgtccaagggcaatttggaaaacaaactgtacagtttcctctcatttatcaggctctaagcgatctgcagtttatctgggctattatgcaatgtgagatattatttatgagaggcaggcagtggcagcttaaacagacatacctcctcagcattcttttccatgcagagttcaaagaggcctaagacatctcacatttatgtgaaatagttgaggcacaagtatgtggttaactacacataaattaccaataaaattaaaagttaactaaaatactacagaagacatttaatattttgcttcagactgttatagtaccttagggttatgaacatcaattacctttgagccttactatatttaaagggaaggggaagctgacatttttatcttttttaatgggtacactctacgttaccttaaaggcttccccggtttaagcaaaaatagaattatgtggtttaaatcatataccttattcttcatacttagctccaagtagattatgacttttcctaaaacttaacatgacagagatttgccttccagggggtctaatttgaagaggaaagtaatttaaatgtataggtttatataatagcattgtatttttctctattttattcattctttcattctcttcgatgactcccagcacctgcgcgtccatcttcattcttagccaatgacctttccttttacttaacagagaaaataacaatcagaagagtcttcataagttcccaccccgtctgcccgctttctac

SEQ ID NO: 788 - DNA, 4046 bp, Homo sapiens
ccagtataactgctacattgtgtccttatatttttggttgaataaacaaaaggacactgaaggctgcctttgtagcttcccctataccaagtgaacatttattaaataagctcagctacagagcattttcagaaatctcagtgcagcttcataatcattaagcagaatatttatctaaaaacctctaacacttaataccagttactcagtatcttaaccaacatgaaaatacaaaacaaccttttattttcaagtagtcccctcagttctcttttatgattaagggaacatttgaatcttttctaaagtttttccttttgatccaaatcacttcccctctacttttctaatggctttataacccttcaacagtaggtggtgccacaaatgcacaaaagtaaatttctgtagaccaacagaactgtcacagctttattttgtgactcattatattacaacatagaaatatgcattttaatacttcatataaagttattgacatacaaaattttttttcttttttccttttaatgaaaatgatttaacttagaaatctgttgtgaaacttttgtctagttttgcaattctcagatattccagtgcaaaaatagatcccattacagacagcgtaaagtgcttggaatgagggccaatgatgaacaaagagcacaaaaacagcttcatcttagggtataagaagggataatagcatacctaaatccttatggaaatagaaacattctaagggggatgcaacaattttgaaaagaattagagcaatatttctacagtattacattattactagtagataataacaagggtacaaattaatgtctcaatatcaaagtggttcagtattacatgacacatggctctttggaaaatattttacctgatatatacaaccacaagaagaaaacacagacaaatggctttagtcaatgattactatacagtgaatgaatgatgtgcaacatttaatagtcacaaagcatttgctttcagtacagataatgaaatacagtagtgtgaggtttggttgttttttaacaatgaattgtgctgggcatttatgtatagagggcttattattttcttctgtatttctcatattcacagttgttaataagttttctgaggtgtcccaaagatgcaaaagcagaaatttttgaacacgtattttgagaatttctgaaactcacataggtacattccacagggaatatacagaaattttgcttgattgagtatagagttggtaaaaatttctaccacaattaggtttacacaggaaaatgtaaaaaattactattttaaaaggtaacacagtattaatgaagatgtataactatagattgtttctagcttcagaagaggtcctttcaatctgtattaaaatgttgtgttttcttcaaaatagttcacagtgccttttgattttttaaaatatggccttgaaatcagaggaaccgaagtaaggagttgctcatagatttactataatgaagaattagaatacgattttagtaaaatgaggaaaccataactttgattttgaaaaatattaaatgaggagaaattattctataaattctgtatttttgaagatactgtaaaatgcaacgatgccatatcactagttattggaaatatgccttcattacttatatttaaaatcaatattgactttaacttctaaaacaatcatttttttctttttcagcagtgggttatataatattctgtaaatttaaaaaatatagaaagattaatttgaaatctgaagtcttacacctttagcgttaatattcaaattctggaaaaagtggaagaagttagtaatgatattgaaagatcacttgaacttccccaaacaatagttctctcatatttttcttttctctcaagacagttaacagtaagtattagtgaaacagtatttttacaaatgtttactgactagaaaaataagactgggttagaaaactctgaaaaatgctccatatggaagtatttgttgtttttatatttttcttgactagtgattgaagagatgaaaaatttgagactgtcagatttaatggggtatccaatatctgcaaagccaattatttgaaggtactaaatgccataaacacaagttgtgtttttcagcaagttttcaagctagctgttttccctgttgaagaattcattgtttagacttgtgacccttatactttcttggcttttgcattgttgcaattaaaaaaaaaaaaaaaaaggctgcccagtattgttacagtgggctcctacaaccacaagacaacctatatttgtaaaccagtgagctgaataacatggcacaggaagtgtactgagacttaatatctctctagtcttatacgtacgtacatactctttcagctacagcatacactcaaaaaatatttgattgatgaagtgagattaagagtatcctaaatgatctgaaagaaactcaaatataatgtcatgagatcctgaccatcacattgctttctaggcactagtcatgactgatatgcaaacttacataagaaaataaaaatagtggggcagtggccatactcctctataccacagggttctacaaagaggccattctaaggattcagaagtcactgatagaacttaaaattccaaataacattaaaaagtacaaacatttttgtcaaaatacaactccatcttttcattttctagattaattcaaaaagccagaaataatacacttgtgtcagataaacatcttgagatgcagtgtaccatgttagcagacagtcaggacaaatgggcacaggcttccctaggtttgaacgcacaatctctttaatcccatgccctggcttcagcagcttgcagccccagcagtttggctgttgattctttgcctcttaccaggatctaagtatatttaagagtctcataaggatgaccctgtagacccatggctcgaagcataggacaatataacaatggaaccaagtttcccgtgcctggagacacccacatttttgttgcatgttactgccaccagaacagcttatcagagggaatcaaagcaggatgttagccacgcatggcaccattctgtcaactgatattcaatgttgatagactctgagcagagcagctttcacaaaagtgagcatgacacaccatggtgcttcaaactttctgaaaaacttggcactaataactctggcacactcattgccagcaatggatgtgtcaccgggaaaccagtctcctgggcatggcatggcttagtgaatgaggatgtgcattaccttttgattttgatcaataatcgctggccatgattacttgatgaattattgttgcaaccccaatgagaatacacaggaacaaaaaaaaaaaaaaaagtgtgagttcaaacccatatgtccattgggttccataatagagtttcacataggtataggtaaaaaactaaattcaagtctttcacttgagagccatacaagacataggctacaaaggcactgcccctgtaatggaattttgttttcattgcattgaattgcattgcattgaatagtatcagtacagtatccagtttacttcttcccacatcaacttctggctcttttctccacaacacttcacatggtgcaaaggaaagtctagttcctctttactttcagccaccccgtatgaacaggattcttcatacatagctttctttcactttctcatcctgtagaaaagatgtgagaactgcaacgtccactactgtctggtttttgtgtaatgagaggtcttttaagtggtcatcatcactttggtccttggcaaagttcacaaatacctgttaaaagattaagatggacctttataaataccactcaacttgctcattctttattctagttctatttttccagatgttgaaattaggtcaagtaggagcatacagaattacataaatggattaactagaaaactgtgtgtgaaggagggaagaatacttgaaaaaagcaataacaacttaaaaatag

SEQ ID NO: 789 - DNA, 4041 bp, Homo sapiens
taaggatgaccctgtagacccatggctcgaagcataggacaatataacaatggaaccaagtttcccgtgcctggagacacccacatttttgttgcatgttactgccaccagaacagcttatcagagggaatcaaagcaggatgttagccacgcatggcaccattctgtcaactgatattcaatgttgatagactctgagcagagcagctttcacaaaagtgagcatgacacaccatggtgcttcaaactttctgaaaaacttggcactaataactctggcacactcattgccagcaatggatgtgtcaccgggaaaccagtctcctgggcatggcatggcttagtgaatgaggatgtgcattaccttttgattttgatcaataatcgctggccatgattacttgatgaattattgttgcaaccccaatgagaatacacaggaacaaaaaaaaaaaaaaaagtgtgagttcaaacccatatgtccattgggttccataatagagtttcacataggtataggtaaaaaactaaattcaagtctttcacttgagagccatacaagacataggctacaaaggcactgcccctgtaatggaattttgttttcattgcattgaattgcattgcattgaatagtatcagtacagtatccagtttacttcttcccacatcaacttctggctcttttctccacaacacttcacatggtgcaaaggaaagtctagttcctctttactttcagccaccccgtatgaacaggattcttcatacatagctttctttcactttctcatcctgtagaaaagatgtgagaactgcaacgtccactactgtctggtttttgtgtaatgagaggtcttttaagtggtcatcatcactttggtccttggcaaagttcacaaatacctgttaaaagattaagatggacctttataaataccactcaacttgctcattctttattctagttctatttttccagatgttgaaattaggtcaagtaggagcatacagaattacataaatggattaactagaaaactgtgtgtgaaggagggaagaatacttgaaaaaagcaataacaacttaaaaatagactttttttccccccttgaaatggggtcttgctctgtccccaggctggagtgcagtggcgagaccttggctcactgtaacctccacctcctgggttcgagcaattctcctgcctcagcctcgcaagtagctgggactacaagtgcgcaccaccatgcccagctaatttttgtatttttagtagagacggggtttcaccctgttggccaggattatctggatctcctgacctcatgatctgcctgctcctcagcctcccaaagtgctgggattacaggcatgagccaccacgcccggccaaaaactgactttctatatcgccccccacccctacatcaccaactgctcagtcatccatttactttggcacatacggtcttgattaaagggaagagggaagaaaatatttactgagtacttcttaagtgtcaggacctatttggtacttttttatctaatttaaataggattaggcaccaagtaaaatgcctggcccatggtaggtgctcactaaatggtagtttttatggttattattacagtaaattctcacaataatcctatagagtacataggcatcatctcccttttcaggttcagagaggtttagtaaaaagcatagctaggaatagtagatcaggaattcaagcaccaattcaagatacaaactgctcttggacctatgggcgggagtgtcggggcaggaatccacaccctgagaagtaaatctgttttgacactcaaagcttacttggtcaagtgttgtctgagaaacagagtagtcttctatgtggagtcgctttttgctctgggagaggatgctgaatatcctggccagagaagataatgaagatggaagctggtattgtagcatgttccggtgtttctcttttagaacacttccaggaaatgcaagtccaaagaaatcctggacaggcttcaggtccgggttggaccctgctattcgtacaactattgtataaccatctccaaacctgaaagcaggaaaaaatacccaaatggaggatctccagaaaactatttaaaagaatactgaaccctgggaacccaacttgtgccatgaaaaagggcggcccctggcaggcccagaaataagtttctgagagaaggaaccagttatcatttactaaatacttattttatgtgaagcaccatgccatgtgctgtaaatacatgatctcctttaatcctcacctggacccatgaagtctgacagatgttacagagaaactgaggcccagggagttagtcacttgcccatggctcagagctcataattggtagggccaggatgcaaacccatttgtgtttgactccaaagcttgcgctctcaccagtactggcacatgtaaatttttttcatttcatctatagcacaaagctaggaggtagatcttccagggaaactaactcttacagtagttaagtcacttgcccaagagtcacagaaccagtaaatggtaaagacagaatttgaatgcagttcggacttcaaagccctcattctttccactatactgttttgctcagttttatttccctttatgttagaggcaccatttatatactcacaaaagaataaatatcaagccttctcactaggcactatcccaaagaaattatctttattacctattttttagatgctggacactgccaaggcacctgaaccttccattgaccatgattgccatcctagtgcaaagagcttcacattcttccatactgcggtaaaacagaaagaggttttagttttagagagattctctgtaaccatgagaacatcaccatgacttccagcattccagcttcctagggaattgtattctgttacaagtacatgtggatatagggatgatgctgttcagtgtagtggtgtttacaattgtgaacaagttggaaataatccaaatgtctacaaaagggggaatagttaaataagagtatatcctaatggaatactatccagctataagaaatgacacctaaatgcactgacttggaataatgtttacaatatattaagtgaaaaagagcagtatttatactgggcttgcatttttgtaagaatatgcatatataatttcaggtaataattgttttactctttgcttttctgtattttctaatttttacaaaatgatcgcatattctacttggaaagttaaaacatcccacagtgaggaacccaagactttactacggacctatgagatgtaagcactactgatctcccctccttgacaacacttagggcacaattccacaagaaccgccgggctttgggatccatgcctgtggtgggttcatcctgtaattagaataaaataagtcttatttgctggggggaaaaaaaatcaaagataaatttgtttttaaatgcagaagcatctttgaaacagcttaaattttaacttgccattctagttatttcttgatgaatcaaagaattagagtaactttcaaattcatttgtaaacaaggtcattattataaatgtcttattgatgcaggaaactcaaatattctgagtacttttttatgtaattaaatttctccaaataaatagggaaggaaaaaggccatttagttgtaattatcttttcatgactgataagtatatacaaaacaactttttgtctgaaacctctattgaagtcagtataagattggggtgaaattcctttttttttttaattccagctcactcagattaccctagtatattgcaactgttagccttacagaaacaaattccagaccgaggtggaatacataaaagcctcaaaggcttcttcccgtaataacatcaatgctcttatctacagaagaaaaaaggtcaagggccacttcccagtctgatctgtttttcatctatccgtgtgtaaggaactatgacctagttgctaccttggggattttaaa

SEQ ID NO: 790 - DNA, 4042 bp, Homo sapiens
ttgagttgtcaagttgaggccaaagttaatgtgtgaaaaacagtaatgaaagccagctagccaaattgcaccacctactctggcaaaagggcataaaagaacacaaacggaaaccagaaaggagaaaatctatttttaaaaaactatttgaatgtcatcaccatcccaaatggatcacaaaagcatgttttagatgtgcgtgctttttctgtttttgttgttgacatgagtctcactctgtcaccaggctggagtgcagcagcgcaatctgggcaacctccccctcctaggttcaagcaattctcctgcctcagcctcccgagtagctgggactacaggaatgcactactatgcccagctaatttttgtatttatagtagagatggggtttcaccatgttggccaggatggtctcaatctcctgacctcgtgatccgcccacctcggcctcccaaagtgctgggattacaggagtgaatcactgcgcccagccccatgctttttcttaaattgtattggattctctgaaatcattctcttgacatacagggtccctctcttctcgatgactaattgctccatcctggcataaatacagaagcctttaaaatccacttttacctcttaacgagcatcgttgcttgattgggtagagatagtctgaactaatagggacaaacgcaatatagacaaagtgtctttacctcaccaggaggaatgcccacgcaaatcctgtcaacagcaggcttccgcttccttctatatatctgcaacaaacaaaatgtaaacattcataagcctcagtgactcacagctctcccaagcaactgtggaaggcaggactataaaccacatacactgcaacataagacttgtcaataaccctaagccataggcatatttgatgtgccaagagccttggtctgcgtttgtggcgactggcttctgaatgattctgaagctcaaaataaaagtgaacttactttttaacctgtctttttagaaccgtatcattcattattatctacataatttttcatctattcaacatatatatgtattgcaggtattttaaaaattaaattccacagagtagaaatttgtaataaaaatattgcaaatactgtacagattccaaaaaagtaaaatttggagatgctggcatctagagggctgatatagaccctcttgaacacaggcaatatatcagctttttggactatgaaactcaaactcaaaatcaaccatttattctctctacctcagttttgactagatatacaatattagtatgttttaataactaacacataaatgtaagcatataaaaccaatgtattcgagaatgggaattcatatcacaaaagaattctcagtaagaattctttaagaagtctccatggtgtttttaaaataaaattgacagaaccttggtatagatgtacattttgggaacacatgcccttttattaagcaagtcagcaaactgctgggttacagcacataaagctgaaaaaaactgaagatgagctattgtaacctgtactctctcaccttcgtcaactccttgatttctaagatgtcattctggcctccaccatcaagaattctctgtctttcccgcctcacatcttcatcttcatcattcagaggagatagctttgcatttacaggtcttgggggaaaaaacaagaaaaatgaacctttcaaactatttttcaggacaaagattcagtctctaacgtagtattataaaacctacttgccacagtctccaggatgggcagggagggggctgcgggatgcccacatcaggaaaatcagttttatcacatattttgagttcagttcaatgcaacccccattggtgagtgtttccctgtgcgcctcctctgtgaccctcaaccaggtgctccacgggttctaagaaaaagctcacctgggcctgatgaagaatctgtactggatcagaacagtaatgaggaagaacaccaccccttccacggccatggcgaagaggtttcgtcccaccaagtcccaagataatggtgacacaaagcgattctcccctagtagacacaatgcagagatccggtcagaatggagggatcaaaaaccatggcccttcctcaaatttgggcctatgttccttaaaattcaccgatcttccaataaacacaaatggctatcacccatgacaaggaaaaaagagtaacaagagagtgatcactttccaagtctgatttgggaaaactttttatgacccagtatcaatcagaatttcagagccaatgtgtattcgatttgtaacttcactgaagatatctagtatttctttttttaatgagacatgccaaaaatccttttaaaaaggcaaacgacccaagtaattttcacagtcagtatttttaataaattctaagttttagtaataataaatatcagaaagcactttaagcagattcccctttcagtagcatatatcctagtgaatcaattaaaccactagattcaattaaatctagttccatgtaaccattccttaaattccttacatatctcctttgtagcccaagttgcaaaaagcccctcttctatgaacagtaaataacatggcccatttgactatattatctaatggatgaataataatcatatggctaccggagaaatatttttaaccattctaaaggtagaaaaagatgtaatacattataattttatagactgtgtaaaagataataaatgacctcatctgcaggcacatgattcgcctaaaagagccaaagtttgcatctttccttctgattccctgatcacctaattctcaaagttatggtttgacttttccagtgcttctaaccaacccagacagtggcatgagccagtggatccaagcaaatgccactattttccttaccttcaaaactgccctttcacttttctcaatgctatcagagacacagacaaatggttgtgtcacaaaacccatgccacaaccagctgtgttggcatgagccctgtcactgggcatgggggtgggggaacatcctgtgcttagtcacctgcttctttccaaaacaaagttcagggtaccaaggcctatgcagagtgccatctccattaaagcatcctacagccactgcttcactcaccaaacctttccagggcatcagccattgcctggtttttcaccatgtcgatgagccctcgtcccaggcaaaaatgtgggaagatcaagaacacggacttcaggatatcattgatattattcagcttctaaaaaaaaaaaaaaaaaatgggagggaagggagggtgagggagaagaaacgggtgtcattcatggtttatcctaaaaatgtatcaagttctgaaatatgggagtgaagaaaaaatttgattctctagggacaaaccagaccttttaattcagataccaattaaatagcagcaggcatagctgatgatatgtagcaataaaattctattctttagaaaatctggagaaatgctctgagtatggagaaataatgaataaagcttagaaacaggctagatttaattaaagcaaatccattaaaaatcccttagcatttgaaaagcaaattgctcatgtctgggtcaatatttgagtttcaggattttgtcagaattttagaaattcttctcaaatacatcagaacttatgatcccacaaggcaacagtggccaaatatctaccaactgaataaggggctatacgctggatgcactgtgctagggcatgggagaggcaaaattattaagaaacagactccactccgagtaggaaaagtatgtaaacaggaaattaccatgtaagtggatgtacgttgtactggaggcatggactaaggactctgagagcacagagaaaagagagaacacctcccagcaggtaaggaaagcttcacattttagctaaatcttgaagggcaagggatatactaccagaccctgtgacagaagaagggcatttcaagccaggcctacaggagcatggtggttggaggcaactcatctg

SEQ ID NO: 791 - DNA, 4042 bp, Homo sapiens
gcaatctgggctcactgcaacctccgcctcccgggttcaagtaattctctcacctcagcctcccgagtagctgggattacaggcgcacgccaccatgcccggctaatttttctatgtttttagcagagacagggtttcactatgttggccaggctggtctcaaactcctgaccttgtgctttgcccgcctcggcatcccaaaatgctgggataacaggtgtaagccaccgcgcccagcctctgagagcttttaaatctctggatttaatttgttttttgagatggagttttgctcttgttgcccaggctggagtgcaacggtgcgatcttggctcactacaacctcttcctacagggttcaagcaattctcctgcctcagcctcccaagtagctgggattacaggtgtgtgccaccaagcccagctaatttttttgtatttttagtagatacggggttttgtcatgtaggccaggctggtctcgaactcctgacctcaagtgatccacccgcttcggcctcccaaagtgctaggattacaggcatgagccacagctcctggcctctggatttgtttttgacctacacttttaaacgtacaactaagtaattcagttttgtctggctcaaatcgctaaatgccaaagacggctctgtatgccaacatattcagaacaatgagctgccaggtgatccgtttaacctgccaactactcctatatcccagcagctacatgcccatttttctgatacatcttacgatagatattttaccttggccagctttaggtgtttcttcatttgtttgatggcatcattaacttcttgactcggaggaagtgcttgagtattactgacacccagggaaaagccgccatacctaaaagaacagcctgacattaaaacccagacagtggggtgcacagtatcatcagcagcagactcagtgcgagtgtgtacaaggttcactgagtcaaattcctgttcaaaggagggctaaattttgcctcagagaagttacacgtcagcttcctctaataaatgttggcaatctcttaactcccatggtttctgcccagcagggaggacctggcctgattacacacacagttagatagctgagacattgaggaaagaatggtgtttcatctcacagatgctcctccaacccagtggctcgtgtgtgaatgtgggtctggaggcaagcagatggggagttgggagagtgggaaccctgcactgtccagagtaggctgcgctggccttatacacaggctccggctcctttctagcatgagggctattataggggcctgcgtctgctctgcccagagatccaggggtcctggcccttggggaaaaggcagagagaaaagacggaaatcagtaacaaggagccttcgggccccctgacgtagccacatcacctatctcattttccatgatggacaaactggcttcaagaactcttctgtccccagtcccacctgttccttcaaaacccagaaggacaaatgggttgaaatacagtgcaaagagatggttttggcgcttcttatttcctctaagacctttttagtcccgtgctaaatgcctagaaattgtccttgagtccttaagaagcctcgggaatctggtttggggggaaagtacaagtaggtattcccctcacaacactacttacttgaaatccctagacacctgcaggagatttctgattctcctcaaggaaatcagtatatcaaatatttcagaggcctctggaggggctgctgggcactgagccatgatgctctaggcagaaactctataaagcaggcctaatctaaatctgtctgtgcccctgtgtgctccacatgttcacagggcttctgtcctcctcacagtgagatggcacccacaagtgtgtgagtgacaaacaatccccaaggctttcttcaatccaagacacctacaacaccatcctccccctgagctaaacgtgccagaaagacagcaacttacctaaactcattcacccagatcttgttctttaagctgcagagacaaagaaacaaaaaatcagttcaaagaaagcactgagcctattcctaatgatgcaaaaggagtaaatatccacctgaggatataaggaacggacagaaataaccctagaatcagctggccttgtagggttgtgctagagaaaagaagcctgtgttcaggcctcttccagccttctctccatcataaataccctattacttatatgagaaccaggccttgggttaaaccaatttacaaaccaccttatagaccaagatgtaaccaaactagaagctttttctttcttttttttttcttttgggagatggtttcgctcttgttgcccaggctggaatgcaatggcatgaactcagctcactgcaacctccgcctcccagattcaagcaattctcctgcctcagcctcccaagtagctgggattacaggcacgcaccaccacgcccagcttattttgtatttttagtagagacagggtttccccatgttggccaggctggtctcaaactcctgacctcaagtgatccacccgccttggcctcctaaagtgctgggattacaggcatgagccaccgtgcctggcctagaagctttttcaattaacaataatatttcaattgtggatgacatatggagaaattatgcttctttcttagaaactcatggtcactatcactccagcatgcccatgccatttaaagtcactgagatactcctaactgaaagaccccaactgaccaagttgatgggaaggaaacgagaacaaacatttgctgagccaagcattcaacactaggctgccatgtcctgggaagctagaaggctctcccaaggctgcagagccaaggcaggctcctaaaccttcccagagctccctccatgagaccacaaattatcatggagtcccccatcagagagtacccaaggcactctatgtacaccatttaatttagtcctcatgacaaacttataagagcaacattaatatcacaatttagataaactaaggctttaaaaggataaccagttacctggtcaagttgctactaagtggcaaaatttgacgttgaatccatttctattttcattctagaccaggctgcctcagccttgaagctgacaactgaatgttcacagtccctctcgtcatcttttctagtttgggataatatcctaaacttccaatagacagaatcaggccataatctggcatttcccccactgtttcagtctgttatttgtaggtctttaattcctctaattagtaataatacggcaggggccaagtttagtaaaaagtcaccttttggctatgatctgcacatacgtcttcaccagataatccgaaatgtttcttcctgtcaggtcctgaaggatatctgcagtgttttgttttctctgtcatcacatgaaaaccaagcatacgggtctttatagacaagaattgaaacagaaaacaaatcaaggacaacagtgaccatgtccacagtgtgaccggaaacctgactacaggtcccagacactgccctcagtcaaccagcactgagacttggttcaccctgccctcggcactggtaattcacttacaccaagccaaggtctttcccaagaatttattctgaacatctaaacaataaacattgaaatgagattctttgtagtcaagagatttttaggaagcaccatcattcactatgcctaataaatcttctgttcactggagttatactgatgactagattagctgttattttattcattttattttttgatatggagttttgctgtgttgctcaggctggagtacagtggcgcaattttggctccctgcgacctccacctcccaggttcaagcaattctcctgcttcagcctcccaagtaactgggattacaggcatgtgccaccatgcctggctaatttttgaatttttagtagagacagggtttcgccacattggccaagctggtttcgaactcctgaccttaggtgatcagtcca

SEQ ID NO: 792 - DNA, 4039 bp, Homo sapiens
acccacctctaccagccttgagcacggcctcataagatcctcacctctccaccatcttcactcacagtgatctggtgacctcccttcccctacactcacttaagggtcatatggatgcttcactgaatttatttatccactgcttactttttaaaagggggttttgaaggaaagtacaataaaaatatacaatttgagaagaagaaagtgtccctttttataaaaattcatatgccatcttttcagattataaaagcgaagaagctgataagcaaaacctaaaaatcatatataatgagagcctattgaagcacttaagtacaggggctgggagagaaagaaaggaaaagcatttcatcagtaagtgtaaagtgctatttaaattaaatattaaggttctaaatcagtaaacaaatgtctgtaatgacgtgctttgcacggtgttagaagactctccaaacgtttgttcctagataatttagttcggttactaccttcgctttttgtaaataaaacataataataattcaaagggcaaatgctggcggtcacaatgtggcatgcagttgataaatgcagcatattagaaatcaaaccaggcaacaagcacaagaagcctgcttatggctaaagtggcactcacgggattgggtttccttccatacagcgggtcccgaagccagggtctttggtgagggcgtttaagagttccagggttcccgtgtcctcaggagcatcattgctgtgggtacatgagaggcagccagcttagtaattcattaaaaccagtaatcgagagataaaaatgtttttataaattaaacattttaggaagcatttctctgtgacaggctcttaaaacagaaatgaacaaaacacagaaaccacccagaaggatctcagactctggccctgtattcggcatcagggtgacgtagagcactccaaagtggagcttgttttaaatgggctgtatgtataaaggtgtgtatgtgtacacacatgtacatacacatatacatttatatattttttttaatttgaagaaaatcaactcattaagtatttcaaaagtgctttcacaattatccctttggcacagacaagcaggattttccaagaaagggcaagaaaactttgtactctttgcatgcacaactagaaagcacaaaaataacaggcacaggtcacaaacacatgctatgttccacaactacgggcaatacagggtcagcagccggaaaggaaaaaataaagtaaacctgaactatgtaagaagaaaatgtgggcttagagaaaaagaggccaattcacattacatatatatatatatatatatatatatacttttttttttttaaatgcttcccttttgtatcactgacacagttcccccatctacaggtctacaaatctttcaggactgaagaaagctcctgctaacaagacccagaaaaatcctttgtccttttctttgatttaatgtattgttacagagtgggggatatttttatctaaagaacaaacactacctaacatcccaaatataacagaatagataataattacatgaattatactttgcagaaaacaagtctctggaggttctatgctttgacagtgtgccctgtgactcagttacagaattaaaacacagctccacaaatccaaatattttataacttaatcatggatttttgcaagggtggattatttcacctaaaacacatgtggctgttcctgacaacagtaggatgaagaggagagaggctgaaaggctcaacagaagactggcctattattcagggttagttcgctgctgttctatgcatgcagtattagcttatacagggacctgagccgcagcagtaaaattcattccaccgtgtaattctgaagtccattcccttggccctcgtaaacatctttggtctgctcgaatcttaccccctcctgggatgtagaagacaaacatacctgacaaatgtgtactgttcgttgtacatccagggctgaagttccaggctggggtacttgccaaagggtggcacgatcaggctgaacacaagggcaatgcagacaaacacagctggcaagacaatctttacccaggcagtggagggggcagggggacagcaggaaacggcaagtgttagaaacaaggccaaggggcaaatccctacgagtccagcccacctccccgaccaaccagcacggcaatgaggaatgcagggcctatgactgtgctgcaccaaggcattcttggcagctgggaagcaatggagcctgaaaactaaaccttttctctggcaacacaaggccagaggttatggccacctggcagaggcactaagccaagaagttcacgaagtaaatagtgctcacattcagggtgactcagaacactgggtcctgcccttcctcctcctgaagactgagaaagactacattgggccatgaacccaggaccaggagccagaagtcctgaatcctggttctgtctctagcacaagtgtacccatgtgaagtcacgctccccactggcctcagttttctcattttaatctgaggtctgagaacacatggcccattcaaatcctacactataataaaaccaactctacagcaacggctccaatcatggacaaccatagtcattatctcccatgatagtctcagaaagaataaatatccaattccttcttcaacctcctaagactttctaccatatcttctctgaaaaaaaaatgacttgggtatactttataagttaacccaaaactccttccatttattgctgagaaatgtattccttataaccttaaagattcaaataatgcccccaattctaatgttctgggatttcaatgcagaaaattaacattgagtgaataattctgtataacaactactataatgagaactatctctatgttgtcattatttatggttgtgttatcaatggtcatcatcaacaaacaaaggtaactgaggatcagagagactaagcagcttgcccaaggtcatatagccaataagtagcaaagtcaggattcaacttgagctctgtatgctccaaactcccgctcttaacaatatccacatcatcaaatgaaagactctctgcagaccttttctctatatttcttgattttatagagtgaaaaaatttaacctttctaactaagcaagttagcatgcaaacactgacatgcagacaatagtctaacaagtcttctctgttggccaactatattctgacctatcttttctatcagtttgagttaaacatcaactcagagaaaaatcatgtttctaataaattcacatgtcaagtgcatctgggcataacaactctcatgttatgacagctgaatacacccaaccagtttttctacactttgtcctttttatgttctcctccaaaataaaaataacatatacacacacaaaactaagcacttactaatgtcaggccccattctaagcacctattcatttttattttcgtaacaaccctgtattgcaggtaatattattatccccattttacagatgaggagattgaggcatagagaagtaacttgccagcggatacacaactggcaaggaatagaactgggattgaaatacagataaatctggctccggcatccatatcttgaccaggatgctatcctgccttcactggtcacagagcctgcagcccacccatgaagccagagtctctggcgaaaacagcacgtctcacctgagcaaaaaatcctttccgactccgtctggcaattagcagtctcttccacaaaagggccacaaactgttgctgtgtaagtttccagcctttcacctggtaggaccctttgccatccatcccactgagcaagtctgtctctctggattctgcaagaagccaacactgaaggtcacctattatcttaggtgttttcggcattgccatgctccttcttctggtgtcttcaacaactatcttgaaggcatgtgtctgaagctagaagtttctcagaagtaaagggctttc

SEQ ID NO: 793 - DNA, 4050 bp, Homo sapiens
tacagggggtgacaagctcatgtttgtggaattaaataaacactctttaagagagggaagaaaggccgggcgcggtggctcatgcctgtaatcccaacactttgggaggctgaggcaggtggatcacttgaggtcaggagttcattccagcccgaccaacatggtgaaatcccatctccactgaaaatacaaaaattagccgggcacagtgatatgtgcctgtaatcccagctactctggaggctgagacaggagaattgcttgaacccaggaggcggaggctgtggtgagccaagatcatgccactgcatttcagcctgggtgacagagcaagactctgtccaaaaaaaaaaaaaaagagaaagagagggaagaagcaaagaaaacagttggaagaggttcccttttcttccacccacaggctgatgactccctcatcatctgtctccagcccaaccaccctcctccactgcagacctcagtagccactggcctactggacatcgctaccacccacccagctagaaatcgagactcactttgatgcctccctctctttcactgctctgccactaagcagtcaccaggcctcatttcttgctttatgccttggccacttggagagcctcctccctggtctctgccttcattcttgcctcatccttcttcaattcatccaccccatcagagtaacgtatctacatctccccttgcctggtcccctagagcttaaagtaaaggtcctcagcttgacacacaagtccctccaaggcatgcccatgcctttctctccagccccagatccctcatttccaagcatacacactggattttcccagctagattcctaatgaatgccattgccatgtttacaaggatcttgtcctttaagaactgggagcttatgaagaattgaagcacctaaggcaaagtcaatttcagactagggaaccatctacttgcccacaaatcaaaattcactgagtcacttcacagggcctcctataatcctctgagagccagacaaacagaaaaagtccaactagtagaaatatggattccaaggagaggaccaggaagaacaggtctgaaaccacacttaggtctacggggctagatcatataaccctcctttagagaagagaccccactttaatggcatgagctatattagtcagtgtgaatccatacaaatcactgtttatgcttttctcagtataaactcctttgtttttaaagggacttcctcagtaacctgcctcccagcggatcagggaatagtcctaaacttcggaagtgttccccctaggtaggtacagtctctaaaacccagccgcccttaaagtcaataaggttcaaaacaagaaacctggcaaaatcctcacctgcttcttaaggggagcagagacaaaaggaagaggcctccctcaccatggaaacaggaaatagtctaatgattctctaactcagcccaaggcaggaagatgtgattaacagcactcaggctcaggcaaaggagacattctgttcttgctcagcctgctccacatttgaacccaattgtctctagagcacttatccctttcaagtggctctgaagcactaagtgcatttcccctccacacagtaacagcagctcatcattcacacagtgccctgagaatgagtatctcaggccagtctacatgtaacatcatgcttttgctcccacacttctttccaaaacctaccaagacacagggagatgctgtggctggctgagaggctgcagccaaaaaggaaaatagggtactgcaattactcaactccacttccaaacaccagccctcactaagttttgcagaaaactgctatttgaccgtgagtggcatggatgctgatatgcacagcgttatctctgcaccatggcctgtacttctggagaggtggtgccctgtgactttagctatgctcactacattcccccagctagataaactgaaagaattctcacctcactcacacctgggaaagtgaccagaaactcacctctccagtatcaagcaggcacatggtaataatgggagggacactcacccggacaaggtccatttcttggctgttctccatgaaggtccagatcttggggctgagttcctcccacatgccttccagatcatggaacacagccagttcctggaaggtcttgttcacctggagtcaggtggggagccagggaccgcagaaaaaggaggagaagcacagacaatgagcgtttggctcctccctgaaaagataccccatcacagcagccctgtgccagtcctccccatccccaagaaatgcctgcttgtaactatgattctatacccacgactggggagctggcccagctctggtctgcatcagacttgaggttttcactctgggaattccagaagagccgtgagtatacttagcgcacacctctgaagctaccttgagttttttgcccccagttctggggagattctggggagggagtcttgggctgggggcagcttacctcagccatgacctgccttgtggctggagtgtcaggtgtatacaggatcttcccaacgagcagcggcttcagagctttccagataatgcgggaaagaggactagactccaaattcttcatcaaatcattgcagtaaggagctatgaagaagaggagagacaaatgctcatatgcatggtcatatactgatagaaacttacaagggctttggagccagagagttcttagttgaaaccccagctctaccactactagtcatataataagtaacttatctgagcctcagttggctcctctgtaaaagtaaaattcataacatctatgtggagagatgtggagaagattatctcagattaaactgagatatctataaagaatgatgcttgataaataatcagagcttattataacgtcaatgacggataactcacgactgagctgatctggaaaaatgttttcatgaagcacaagccctcccatccagattcacactctcatgccagcctcaccattgttttcactgacaactaacatgaccaacatttaaactgactcttgaggggcaaccagaaggctgaattcagacctcagttttcaagcaaaaaccaaaatttggggctgggcgcagtggctcatgcctgcaatcccagcactttgggaggccaaggcgggcgaaccacctgaggttgggagttcgagaccagcctgaccaacatggagaaaccctgtctctactaaaaatacaaaattagctgggcgtggtgacgcatgaggctgaggcaggagaatcgcttgaacccaggaggcagaggttgcagtgagccgagattgtgtcactgcactctagcccgggcaacaagagcgaaactctgtctcccaaaaaaaaaaaaaaaaattctcaacagggcgcagtggttcacgcctgtaatcccagcactttgggaggccgagacaggcggatcacgaggtcaggagatcgagaccatcctggctaacacagtgaaaccccgtctctactcaaaatacaaaaaaaaaaaaaattagctgggcatggtggcgggcacctgcagttccagctactcaggaggctgaggcaggagaatggcgtgaacccgggaggcggagcttgcagtgagccgagatggcgccactgcactccagcctgggcaacggagcgagactccctctcaaaaaaaaaaaaaaaaattctctttaattaacacaaactagtatatgtacacttaacaaaaacccaaatacaaaagttgtaacagacaaatgggtttggttatccagcaggatccctgatttttaaaaattcattctaagtttttcagggatttttagataccaagtatcttctatatgctggaaagataatagaatttttttttttttaatgaggatgccctcacaattaagtctgtcatggaaatgaaggcttccttgggtcaacttgcaagctgggggagaggaggagatgggatttaattaaagttgcctacaataccatccttttaaggctt

SEQ ID NO: 794 - DNA, 4044 bp, Homo sapiens
tagctatgctcactacattcccccagctagataaactgaaagaattctcacctcactcacacctgggaaagtgaccagaaactcacctctccagtatcaagcaggcacatggtaataatgggagggacactcacccggacaaggtccatttcttggctgttctccatgaaggtccagatcttggggctgagttcctcccacatgccttccagatcatggaacacagccagttcctggaaggtcttgttcacctggagtcaggtggggagccagggaccgcagaaaaaggaggagaagcacagacaatgagcgtttggctcctccctgaaaagataccccatcacagcagccctgtgccagtcctccccatccccaagaaatgcctgcttgtaactatgattctatacccacgactggggagctggcccagctctggtctgcatcagacttgaggttttcactctgggaattccagaagagccgtgagtatacttagcgcacacctctgaagctaccttgagttttttgcccccagttctggggagattctggggagggagtcttgggctgggggcagcttacctcagccatgacctgccttgtggctggagtgtcaggtgtatacaggatcttcccaacgagcagcggcttcagagctttccagataatgcgggaaagaggactagactccaaattcttcatcaaatcattgcagtaaggagctatgaagaagaggagagacaaatgctcatatgcatggtcatatactgatagaaacttacaagggctttggagccagagagttcttagttgaaaccccagctctaccactactagtcatataataagtaacttatctgagcctcagttggctcctctgtaaaagtaaaattcataacatctatgtggagagatgtggagaagattatctcagattaaactgagatatctataaagaatgatgcttgataaataatcagagcttattataacgtcaatgacggataactcacgactgagctgatctggaaaaatgttttcatgaagcacaagccctcccatccagattcacactctcatgccagcctcaccattgttttcactgacaactaacatgaccaacatttaaactgactcttgaggggcaaccagaaggctgaattcagacctcagttttcaagcaaaaaccaaaatttggggctgggcgcagtggctcatgcctgcaatcccagcactttgggaggccaaggcgggcgaaccacctgaggttgggagttcgagaccagcctgaccaacatggagaaaccctgtctctactaaaaatacaaaattagctgggcgtggtgacgcatgaggctgaggcaggagaatcgcttgaacccaggaggcagaggttgcagtgagccgagattgtgtcactgcactctagcccgggcaacaagagcgaaactctgtctcccaaaaaaaaaaaaaaaaattctcaacagggcgcagtggttcacgcctgtaatcccagcactttgggaggccgagacaggcggatcacgaggtcaggagatcgagaccatcctggctaacacagtgaaaccccgtctctactcaaaatacaaaaaaaaaaaaaattagctgggcatggtggcgggcacctgcagttccagctactcaggaggctgaggcaggagaatggcgtgaacccgggaggcggagcttgcagtgagccgagatggcgccactgcactccagcctgggcaacggagcgagactccctctcaaaaaaaaaaaaaaaaattctctttaattaacacaaactagtatatgtacacttaacaaaaacccaaatacaaaagttgtaacagacaaatgggtttggttatccagcaggatccctgatttttaaaaattcattctaagtttttcagggatttttagataccaagtatcttctatatgctggaaagataatagaatttttttttttttaatgaggatgccctcacaattaagtctgtcatggaaatgaaggcttccttgggtcaacttgcaagctgggggagaggaggagatgggatttaattaaagttgcctacaataccatccttttaaggcttgtaaagcaacttgcgaatgtctggagtgctttactccagagaagaaaaggttcttgtgttacaataaagtacaaaacctgcctcactcagtgtctgaaagacacacctgtggttggaaatggagaaaggttcccctgcatcaagttttcaaggaaaaggatgccactgcctaaaactgtgacattggatccctgctgccacgaggcatacggcacacgggcccacaaaagtgcttaagtgtggggagtggatatggagacacagggttctttaacactgccttgcagctaagaatgggaaacaaagggcagatcaaatgtctgagtgtgagaacacacacgccaccactaacagttatcttagagagcacagatccaggcagatttgggcttgaatcctggctcttgtggattaactctgatgtggctctaaccaaggcacttaacctctctgagcctatgaaatgtggggttaaagaatcttccctgcagggttatcatgagggtaaaatgagataacttaaacagaatgcacagtgcacaagaaattctacttaaatgttagttctttgttgttgttgttgttgctattatcattactgttatttctttttatgttattataaagcttatctcaatggtaatattaagaccagtacatcatcctttttaaaaatgcttttctagcttttttgagttacaactgacaaataaaaattgtatatatttaaggtatacaatgtgatgttttaatatatgtatactttgtaaaaggatcaccacaatcaagctgttaataaatccatcacctcatagttgccttttttgtgtagtgtgaacacttcggatctactctcttagcaaatttcaagtatactatacagtgttactaactatagtcatcacgatgtacatcaagatcccaggaacttattcatcatgtgaaactgacactttctaccttacatatattccatatataagtgagatcttgcaggatttgtccttctgccattatctcattcttgatcaccctggaagccacccttccacatcccccagaaaaccagaaggttggctgtcaatcattcattccattgataaacactactgtgcacctgagatgtgccaggctgcattcagagaactggggacaggtagctattcaagagaagcctctctcctctaggaagagctcagtctggtgggcaaatgggcatgtagacatctaacgctgctacagagggaggagatgacacaggccaaggccagaactaagggagggatggggttggggacagggctggggtctgcatggacactcacttgtagagttgtcatagaaggtttcagcatcttcctcagtgccattgcctccaaagagggctttgtagttgttgtcctcataccagttgagagacttgatcttcagcccccctccctcgggatgcccgcagacaatacgagacacagcctggtagatttgggtggaggagctggagctgttcacattggtcagaaacatcacctcctgtcgcatgtcactccagcttctcatgctgaacagctggcgtcagggatggggacagaaaggagggtaggggaagggagaaaagggcagtgcaagggttggggatgagaagagaaagaaacatcttattttcttgacctctcaaaagccatgtcccagaacatattttgtctgatgtcatctcaaagccttgggatgagcttgccagaacctggctacccaatctgtggtccagggacgagcagcatcagcattactggagacattgttggaaatgcggattctgagacccctctgccgacctgcagaattcaaatctacagcttcacaagatgcccaggtgattcctatgctcactaaagtttgagaagcacagcctggagttagtgaagcccctggggctggg

SEQ ID NO: 795 - DNA, 4045 bp, Homo sapiens
aacacaggctttggaatccaacagttctgggtttgaatcccagttttgtcaattaactcattgggtgactggaaaagttgcctaacctttctgagccttggtgccatctgcaaaatggacatgatgagacccactcaggtttgtcatgtggagcatacagggaaatgggtgacactgtctgaacctaggcagcttctcagaagacattcactccctttttcttttcctttcaagggttgtgctttggtcaaaattatcaactttccacacgctgactggacaaacaagtgcatttattgatcttctcccatttatctcacagaaatagcaagtcagacaatgagtaacttttgatcaaagggatctggaggtgttctattgaaagaggcagatggtccttgcttgtcctggaccaggagcaagcagggcacaagaaacagctgccaagaaaaacgtatattgttcacttggagagtttccaccacatcagcaatgggaacatcacctgcttccaatttttttttttaatgccagaaaaaaaaaaaaaaccagggccagtgatgtaagtgaaaacagctgtaaccaaaccctgagtttagaggcagcctcccctgttacagaccctgctttgctttctctaaggccagaaatgaacaagggacagagggctgcgaggggatctgcagagcaatgcaaggcatgtcaatgtcagctaacagggccctagagaaatagctacggacttgcaaaacagtttctctttctcattctccccctggaagaaccccagttggtccagcttctctacctagtaaaaaaggttaccagccttcataaccagggtaacaaatggcaagctgaaagaaggcttctcctctggaaaaggaacccaaaagtcagacctcatcagtcagaaacacgtgagcagaattcaaagaaagaaagtagaacaggacaggaagaaatacactaacgtatcaatagtgtttgatctcagcatttttgtattttccaagtcttcagcattttccacaatgaacatgcaatactttcattgttagaaaacataaagttcgtttttgatatttgaaaaaatgatgcaagcaccaaaaaatgggtaggttagatacaagcaccaaaaaaagaaaaacggattagagaagcagctaaaaataagggtggaccaagtctgagacaatttccccacaaattattattttccaatatcctacacgttaaagtctgtattgtttgtgagcactgccccctggctcagcttcctatgctgggggacaccagacagttcctcgcttccaagcctaatttgagacaaggctgggagtcagaaaggtggagtgtgcactggctgggagtcagagctaactgcttttgcaagtgcctacaggccctctgatcctaggacagagattactctgatacatttgtcaacatgtggacctaaaaggcaaactcaacttaatgttcattaagagaccatattcccatagttgaacctcagaagccagatgctttcaagggaaagggctgaattaggggtaccacgttattcctgttagttagcaagcatgtgtgttggtaaaatgattggccttgctactgaagaagcaatatggagaaattgctggtcagacaaaagcagtgcatgggcagtggcagagataattctcctctttacaaatgtatgattacctaggggcaaaaagaaaaaatggagaaggttctaaactagatatccagctgttagccactaaccaattagctctgagacatctatgagttttaggtttcttcatttctaaaataaggaaatcaaaacattattgtttacatcacttatactttgaaaattgatattacatcccatgtgatattcaactcaaaaggacctcttgccagactcaggaatgaaaatactgatacagtggatgatccgcttcctggtactggaaagacacaacttacctcctgggccagagtcccaagactatgcagcaatgtttttgtggcttcagccagctccttgctcgggaagggagatgtagagtttagtgttctctgtaatgagaaagaaaactttgtttctgaattcaaatgtaaacctgaaatctctattggaaataaacaagtgaattaaaactgttcacaatcttgagtttaacaaacaagaaaccgactcctaaccaaaactaaagacactacaattatttctaactgtaagtttgcattttgttcattttcaaactcattctttgattaatggttttaaatgaagtaggaatattgtacttaaaactagttaatatgcaatagattaaaaggatctcatgtgggctggggggatgtgtccaatacaactctgaccgcaaattcccaaatctgtctgcgtctgcaagatgggtaatacgggaatggctttgagaaacaagttaatgacggctcacaagaaaggaagaaaatataaagtttaaagctgtcaaaaatagggaaagatggaattctgtcactctgttcaagtcagcactgtttctaacactggaaattgaatgtagaacacttatttttacatcgagttttagtcaaatctttatatgtaccaattcatatatttaattgctgttatatgtcacctaactgcacagcagatataggacaataattcattagaacagggaaaagataaattagggcagaaagcataagctaaagaaaaaaaagaacaataatttacagactgtgaagtcagaattgctatagctgaggagcctcaagttgggttctgagtgttcaggcttccaaagagaaaaagacgtgagatcagtttcttcactgttatttgtcaagcaggaaaaaagtatccagggaaaatccacctttcttgatgtttctatgagcattgttttattcaatatcatatcagacatctctgaagtttagagaaggttgggctattttgacatttgtcatatcagagactgctgtgaaattataatgtagactacacaagaaaatgtctagaagtggctgggactcactatctctgagaaatagctgcctgggatgttttctttcaaagagaattccaaatgcagaagggattgagtatcattctgatcatcacaatatccaagcataatcctcaatgtgcatttctaagaaaacctgcctaaaggttctatgaaagaacttgtccagctcattcatctcttctggaacgggttcttcaccagagtcccaggactcccacattcacagtcctcaaagggacctacgcggtctcccttaaacgtcagactcagataggcctctgtgatacgcagaggtgttcatgattgttccttccatagagagtaattcatgagcaaaaacaggtgaggtgttttgtttctactttctctctttgggttcactttataactaaaggttaacacactagaagccgaacctagggagaacttgcctggaaaactattacaaacacaaactgagagatcttaattgaaagctataggaggtaaagtgtttttgtgtttaccgttaggcctacaagatgacagatgttcaagacagcatagcaaaaacaaaacaaacccaggacaaaacaagaaacgccagatccacataacctaaatttaagaaaaacttaaaaacgtggtagttaatccacttcttttataaggactcaatggaaataagattgttaggattcttgtcactcactctcccccgccaccctgtgccccaattctccagtcatgggaacctggggtagctatagaaccctgggcaaatgactcaaattccccatccttccattttctcgactatgcagcaaagtttaaaatgctgtgcacatatcacagagtttttataagcactaaaactagaggatatgtacaaagcccctcgcacagtgcctggcacatggtaattcctcacaattgtcaacaatgtcatcccctgcctttttcttcccttgcatgaaagtttactgccaaaactggagggcttttgtctgcaaacaggg

SEQ ID NO: 796 - DNA, 4063 bp, Homo sapiens
atgagtaataaggtagaacagtcaatgccattgttagaatcatttttaaactagttctttattcgagattaagtgctcagcatttactaataatattggcaatctgtagtcaatataaacaaatttccattttcaaaggaatattggttggagttacacaatcaggcatggattgacatcacagggttaacaaaacacacatgattcaaattctacatcaagtttaaagcttggattatccagatattttgctcatgacttaattttacttttctgtgcatccaaaacataccataacctgaaaaaataagccaaagactagaagcatggatttttaaaagtttagtataaaaatagaatactatggcaaaaattaaccagattccacatgtatcaacattgataaatctcaagaacataattccaaatgaagtggcaggccaatatgcacacttatacaatgtgaacacatttaggccagtaccaaatattgttatacatagaatgtaagtatacatgatatagaggattaaaacatccaactgcaagacaagagttatctctgaagaatgagctagggaaacagaggtggcatcagctgtacctgtaatgttttatttcttaaatagaacctggagtcagcacggcaaaatgatggatgatggtacaggagtgttctttttgtttgtttgtttgtttgaagacggagtctcactctgtcacccaggctagagtgcagtggtgtgatctcagctcactgcaacctccccctcctgggttcaagcaattctcctgcctcagtctctcacgtagctgggattacaagtgcacgccaccatgcctggctaattcttgtattttcagtagaggcagtgtttcaccatgttggccaagctggtctccaactcctgacctccagtgatctggctgcctcagactcccaaagtgctgggattgcaggcgtgagccaccacacccagccaggagtgttctttatgttattctctgtaccttttttcatgttgaaactatttcataattttctttttaattcaatgaaaagataaaagaggaaggacaggtgagcaggaagaaaggaagggtaaagaatctatgttggcctgagcacatatcagatctaacagacagataacttccttgaataaaattaaccccaggaaagaattcatgccttgaaactagaacacaaaatacggtctgagaatcatgtgtctgcacctgctattaactgtgctctcctgctcatgcttacttgacgaaggcagacaaaacttgccaaatcctatttccaaagagcttcagtaaaaaattcacagcttggaattcctactattatttttctaaccaaaaacattctcttggctatgaactcacataggtctccattgcacccaggagacaagtgactttcttatacgaagtaaaggaaatgggaaaaagaaggaaaataaaacctttagtgagggactatattttctgagttaagataacaggaattcatgtatgactcaatattttcagatcataactgtaatgtcattacaggaagaatgcacaaatgcttactgttattattcaaaagctcccacccacttctgcaaaatgtgttaatcacaacataccatgtttcctaaaagcatggcattctgtgacattggccccagaaagataaaggctgttgtgccccattctttctgggtctaagagatggcttcattatattctttccatcctcatgaacttagttctgctccaaaggccattcacattcacagaaatgctctgtttcgtattcacctcatcaagtcactcagcctgtggagcctttaatggctccctttactctgaggataaggccctatatcctcacatggctcgtgaagaaagacctgcctcagccgacctttgcccacctctgcaggcatcacgtctcatcgttccttctcccatcaaactccccacagctatatctgctccatgctgaactatctcaatcaggtacagttcccctaaatgccaccttctcttccctctcctctctggaccaatgcatatactatgtcctctacctggaacattctactccctgttctttacctggctgacatccattctttaggtccccacttagaggatgtttccttcctgactggaaagactgcagtaggaggccccatcagggactgtatcacacccagcagagcgtctcctgctctatacggcagctgctcctttcctggtctgtcccacccattccccaaccaggaatgaaacagagagggctggaccttgcacatgactacctccctgggccagagcatggcactgattagggctcagtaaatgtttactaaatgaatgaatgcatttgttaatccattatcactacacgaaatgaacactggaagataatattacaatgcattaggagtcacagccaaatagaagtagaaaacacatctgtgcaattaaaatgcaactgaaaatattttcaacttataaaaatctcatctacatctaaatttttcaggaattctatgacaaaatgagacgtgggtatacatatattggaatagtattttcaacacaatacacaattttgttttcctcctgggaatgcatgttacaatgtgttcattgaaacatttcaaatgtcctttaaatatcttcataaagtagacaaaaatctctacttcactttgaccatatgcaaaatccaactcaggctgggattagtatgttttagttcaaactgaaaacaagtaaaccacaaatcaaagactatcaccacccaggagtaattgctatctctttctggtgatttctatgacagtaaagatttcctctgggaaacattttaatattttttattgaaatacgaaattataagactacatttctaaggaatattctaatcttttaaaaaataaatcaacaacctaaatattaactttcaaattagatgtgtttaacgcattcaaacgcttcattttttgctgtttctaaacatagttaaatacatctactaccacataattcagaggaaaaaattaaacctgtatcttagatctggcaacaatatttaatgaagaaatagtataactaaggtgaaaatgtctgtgtaaatggagttgagcagtcatattaacacactgctatatctaccagctagtgctcttcttttcccataagaatgaggtgaacatagagtctgaagagtaaatctacacagtgtgtcattccacccattaccaacccatggggattgcggctgcttgctgggagaaagcaagtaaacaggtgggcagtcaaatcacacaaagccaaacaaaatctgatactttccaacaatgtccgggttccagacaggagaacacgagcaagtgttctctcctgcaaaaacccacacagacgctttaaggactgcatgtaacaagctgaagtatctagccctaaaaagccatgaggctgaaggtaacaacaagccccatctgtattctgggtccttgtctaagagtcaagaagaagctaaataaagacccctcaagacaaggatgactttgttcactccttatccatctgcttcttcgatctgtacacagctcagctgtgacattacttgtcttctgggagcctcggggcaccctcactttcccttctttccctcatgaaccaagatccacttggtgggaatgtgctaggcacactggaagacacgtggacagtggaaccactggttccacaaaaaccacttcttttttttccccacgttattgagatggagataaatctgcatgcctggacttccaaccttaaggatcagacaccattttcacatcactgaggcaatggtgagtcaaggacagagcccaaacctagctcattcaaccccacattcctcccactacagcccacagtgtctgtgttggcaaagactgctgtgagggagctggtcgagaggtcatcagtgaaactggaacgaggacagctctcactctgtagacccaggacctacaaagaattcctcaaattcccagactca

SEQ ID NO: 797 - DNA, 4046 bp, Homo sapiens
gcacacttcagttctactcatttctttaactggtccttgctgctaggctgtcagcctacagttagtgtctatgtttaagaatactgacaacaggccgggtgcagtgggtcatgtctgtaattccaacactttgggaggccaaggcagacggatcacctgaggtcaggagttcaagaccagtctggccaaccaacatggtgaaaccccgtctctactaaaaatacaacaattagccaggtgtggtggtgcatgcctgtaatcccagctactcaggaggctgaagcagagaatcacttgaacctgggaggcagaggttgtagtgagctgagatcacgccactgcactccagcctgggtgacagagcgagactccaactcaaaaaaaaaaaaaaaaaaagaatactgacaacggagggcctttgttgatgtcatcttctgcctctgcccaatcatgctttgttccctttcctttccttacacaagtattgatcccaagaatttttcaataaatgtcttgtatgctcaaaaaaaagaatactgaaaatacagaaactccaaggaccatccaaggaccatctccatgcttaggatgccccttattttaaactgattagatgtgacagatatgaaattggcagggggcaatggaaattatgctaaatgcaactactttcaaaagcctgatgcctttggcccatctcctaaccacacaattggtaaacacaaggcatattttcctagtttcagaagggcacgcagtaagcacatttttctaattttaaaaattctagatcatgtgaagcaaaaagcttattttcaagaataaacatttccactacttctgcttcttgtaaagacaagctagtatgcagacacgagataggggaggaagcagttcccctttctgccagagaataagctcaaaaagtgtctctgaaaaatcaataaccatgcaagctgggtctggtgctacccactgcacaagagctgtctaataatgatgccagaggaagttttctatgattctaaagttaaaattcaacataaacactaatattatttcctgattttataaaattctttttttttttttttttttgagatggagtctcactctgtcagccaggctggagtgcaatggcgtgatattggctcactgcaacctccgcctcccaggttcaaacgattctcctgtctcagcctcacgagtagctgggactacaggagcatgccaccacgctgagctaattttcatatttttagtagagacaggctttgccatgttggccaggatggtctcgaactcctgacctcaagtgattttcccgccttggcctcccaaagtgctgggattatagacgtgggattacagacctttgaagtgatctcgtccatcccacctgagctttgtgacactagtccgttcatttctgtttccccagtgccatctcacagagctaaaattggagagatttaaagccttattcccacaagctgcagggactgatctcctatttaatgcaaagcaagcaacagttctcaactcagtgccactgcgtccagcccttattttataaaattcttaaaagtctccaaatacacccttgtctaaagtctcctgtcctcaattttttagacagagctcctccagatcaataacccttaaccacggttattgcctcagaactgtgaatattttttaagtttaactcaacttaaaatgtatcccttgtaggaggaaatcatcacaaatgccaagtgataagccagaaatcaattttattttaaccagctggcccatgacgccaggttgcatattccactcctggatggtttggcaattcctgcctgaatagggaagtaaaattaagtgaagttgtattcaaactacctccctccccttcaccaccattacaaggacaagggtttattcatttctttccagtagctgcacaacgtaattgccatcagccctactgaggaagctggaggcatcagcttaccttgtggagaatgacatcagccctcagcatcttgtccacagtagactttgggagagagaggttgtgatacaggaacccagagaaggtttcattgtccaccaggaaatcttgaagcttcaagtctattgagaaatagtgttttatttttatttagtaagtaactcaaaaaaaaaaaaaaagtgggcacaatgggacagtggagaaacgttatcataatattgatgatcaacagttgcctggctaaacacacacaggaatgagataggggagcatcgccatatcaggagaggcatgaaaatattgctttctggtaacatgttgagccacactcagcatgtgctcctcaactcaaacagtgtgatggtgctgttacacacacacacacacacacacacacatacacacacacacagcctttccttttctttttttttttttattttgagacggagtctcaccctgtcacctaggttggagtgcaatggtggaatctcagctcactgcaacccccgcctcccgggttcaagagattctcctgcctcagcctcccgagtagctgggattacaggtatgcatcaccatgactggcaaatttttttttttttatctttagtacagacagggtttcaccatgataggcaggctggtctcaaactcctgaccttgtgatccaacctgccttggcctcccaaagtgctgacagtacaggcgtgagccaccatgcccggtctttctcttctaaatgatctcacccaccccacctgagctttgtggcactagtccgttcattcctgtctccccactgccttttcacagagctaaaattggagagatttaaagctttattcccacaagctgcagagactaatctcctgtttaatgcaaaacaagcaatggttctcaaacttaagtatgcatcagaatcacctggagagcttgttaaaatgcagactgccgggccgggccgggccgggccgggccgggccgggccgggccgggccgggccgggccgggccgggccggcccccacccccacccccacccccacccccacccccacccccacccccacccccagagtttctgatacagcggccctgggatgcgactggagaatcacttacaggtgatgctgatgctgctgacctggggaccatgttttgacaaacactggcagagtgcattacgcatatcaaagtgccttcacagacatggtctcattttcattccaaacataaaacatgtgatacaaagctccaaaacccaggtctgccaggctttaggaaaacacattaacatatatttaaaccatcagccctattaaatgatttgattgctaaaggatttcatacggaatctccctaaataataggccctctgagtacagttagaaaaggcttcaatccagtgcaacaaaacagaaaaagcagcactaagaatccagaattttagtttctagagttggaggctgtgtctggtggcgtccctgcgtacctcatgtcatctttctgaacctcaatttcttgatctccaaaatgagaggtttctgaccagatgcttggtaggagccctatgactccgaaacagtatagttttccctgactcatctcatttggctgtctacctcttctccttccaacccactctcctaacagcctaacttctttgtaataaagataaaaccagctcatcaggaccacatgaactgagcccacatggccaggcactaagcaacctctagagggcaaactttgcaaactgaaatcatttaccagaagagaaacaggtttgatctgaaaatggggctacagtgtgaggcttaatgaggacaggagttaatccgcggagctaagagggtcacatgcagagataaagtaacaggagggcctgacagcccagccagtctctcataaatgctgtatgatccaggtgtattctgctttaggcaaacttcagtaatattgagttatatagacagaataaattgagcaagatttacatcgctagagaaatgattcactgctacccctctatggctagctcc

SEQ ID NO: 798 - DNA, 4051 bp, Homo sapiens
gaagatcagagatactcatcatggtaggtgctcaatatatggtaataatttgtgattatcaaaaagattttttcactcaactttaccaatgtacaacaatgccatttatagaaaagatggggacacagtccctgccttcgaggaactttcaaggctgaaaggggagataaagaggcaaatcaattcaagaaggcagaaggaaggataagcaagccaaaaggagacagtaaatggaagcactggcccaagatgaggtttatctgtaagtgcttcatggcgagcaaccagactggagccaagttctggaaaaggacagagtcaaaaatccctagaagtggctggagaggaaggggtaagacctctcatgatgacaacgaccaggacattttgtggtcataatgctatgcacatagtagattctcaacaaatgaatgaacaagcagataattagagaagagatttctcaaaacctcagatctgggtagtaggaaggggagaaaaaaggagggggtgaggacagagtacagtggctttgtatctgctggtctcagtcttctcccctatgttgctggcaggaaaatgggtggaaagccaagaatattaagaaagccagatgtctgaaacataccttctcctcttaccccatcctcatgacatggcccatgagtcacctcctccaggaagcctgccctggccttcccatcctcaagctgggttaggtggccagcccttttttgtgactttttttttttttaatacagagtttcaccctttcacccaggctggagtgaagtggcccgctcttggctcattgcaacctccaaagccccaggttcaagcaattctcctgcctcagcctcccgagttgttgggattacaggcacccgccatcacgcccagctattattcctttttgtatttttagtagagttggggtttcatcatgttggccaggctggtcttgaactcctgacctcaggtgatccactcgccttggcctcccaaagtgctaggattagaggcatgagccaccgcgcccggcgttttgtgactcttttgtgcccaacatcctatgttttccactagtaccacacagatcaagctgcagtcacccatgtaaatatcctgctcccagaagaatagaaattccttgagggccagggtttttaattccaaagccagcagtgcctggcacagaggaggcactcagtaaattggatgaatgaatgaatagatggatggatgaactaatgaatgaatgaatacaaatgagtgaataaattaatgacctgatgtgatttggggaattgccgattgcagagaagaaaattcaccttgcagtgagttagggaaaagatgaagcaggacatgaacttgaaacaaaccaagtaaagaggacacaagagttctgctaaacccactcagccacgtcagcccagatcaagaggagagtcaggtgagtggcagctagaagcagagtggggaacaggagagaggaaggctgagttgattaaatgataaaatggagatgacaatggcatccacctcattggactgagctaggtgttaaatgagcaaatgtacctgcagacctagtataatgccgggcactgagtaaggtgcccggtaaaggatggctaatatcatcatcattttcaggaatgactgatctgaacagattcatggctaatttaaccttaaagcatattcagaatagacaagacacagaagtggctttggcggctaagttgagatgttgaatttgtgatctaaggtatgcacatgtgtgtatgtgtgtgcatatgtatgtgtgtattataatacatattagcctggctgagttcctaagacagaattattgagttctttctgctgatactatctataaggtaaaggaaaggttgaagctgactgatttgtctactcataactttatgaaagaataaataaatctagtattttacagggaatcaccaggaatgatcatatccaccagtcactgcaaggatggatataggtggaagatgacctggacgaaagaccaatcattccacacaagacagggaatacttcctgaacaggagagtcatttagccacttaactttggccaatgagttaatgcggacctggattttataatcagtaaaatgtgtgggttggagaagatgatctctgaggtcttcttacctgacactgaaaggaacacagggcaaaacaaaatcagcactggatacagcatcacagggtctgaattcaagagtcagctctgccatttcctgactgtgtaatcatgaagctatactttcccccctatttaaatctccctaagcctcagtttccttggatataaaatggggctaatacagcactttgggaggccaagacgggtggatcaactgaggtcggaagttcgagaccagcctgaccaacatgaagaaaccccgtctctactaaaaatacaaaattagccgggtgtggtggcgcatgcctgtaatcccagctactcaggaagctgaggcaggagaattgcttggaggcagaggttgcagtgagccgagatcacgccattgcaatccagcctgggcaacaagagcgacactctgtctcaaaaaacaaacaaacaaaaaaaacggggctaataacattcacaggttgttgtgcaaaccaaagatcaagaacgtgaacgtgctgtttcaggggaaaaagctgacttgctccaagtgttcgctcgggtaactggaaggtatgacctctgtcacaggatgcggagctgggctactgctgccagcagaagagaaagtcactatccagcagaaggtcaagagggctctcccaccacagtctcttcaatacagaccaaaatacttgacctgctgagctcagcctccttggttttgcctggaggagcaaacagtgacctaccaattagccaagagcttctgtaaagtggggcaaaggaaaggaaaaagaacaaaaaacaggtgacatgtgtgtttgtgggctggaagaaacgaagcagaaccctcagcttcttgccacacatccaggcctctgggaccaagccggggaaccagctgggacctctgggacccaggtccaggcctctgggaccaagctgaggaacacatttgcacgtgcaggcggaggggtatgacgcggggtgggggcgaggtcctgctttccaggccattcagtgttccttcagttctctgagcatagaggacaaggaaggtgggaggagggaggagagggaagagaggggtgaaggagcttgggggaggctgggaaagaaggaggaaaggagaggagggagagcagctcaggaaggcggaggaggaaagccctttgctgagctgagctgagccagacggggttactctcggtcagtgccctccagtccccagctcaggtttcaagatctgtcttctcttttgctcaacatgaaaaggaaccagagcaatcagctgctttagaagtgggtggaggaggcaaatgaaaaaaaaggagaagtagggaaaatcacatcagcatcccaggcccagatggtcttcttcaatggacccctggggtgggggtggggtggggcctcccagcctgctaggagctgtcaactgagcagggcctgggagcgggagacaaattctaactcgtggttttaatcagcctgagcttgtccagccttacaaataagaccttgaaatacttctctgttatacaagggctggtaacaaatacactccagtgtctttatggtatttttttggtgttttgttttcctgatgctctgctgtcttcttgaagaatagacgatgcctgcttcaccaatagctgagcactctctgggaagacctggttgttgggtgctgaggagaaggggtgaggcggggtgatgcagctgctccttcaggtgactccttagagcaggggagagtaggccaggggtgtgtggtacacacagcctaaggacacccatgctgttcatcccggcctgggctttccaacccaggagacacttccttctctacagagaaggctcaccgagggatacca

SEQ ID NO: 799 - DNA, 4068 bp, Homo sapiens
ccaaagccagcagtgcctggcacagaggaggcactcagtaaattggatgaatgaatgaatagatggatggatgaactaatgaatgaatgaatacaaatgagtgaataaattaatgacctgatgtgatttggggaattgccgattgcagagaagaaaattcaccttgcagtgagttagggaaaagatgaagcaggacatgaacttgaaacaaaccaagtaaagaggacacaagagttctgctaaacccactcagccacgtcagcccagatcaagaggagagtcaggtgagtggcagctagaagcagagtggggaacaggagagaggaaggctgagttgattaaatgataaaatggagatgacaatggcatccacctcattggactgagctaggtgttaaatgagcaaatgtacctgcagacctagtataatgccgggcactgagtaaggtgcccggtaaaggatggctaatatcatcatcattttcaggaatgactgatctgaacagattcatggctaatttaaccttaaagcatattcagaatagacaagacacagaagtggctttggcggctaagttgagatgttgaatttgtgatctaaggtatgcacatgtgtgtatgtgtgtgcatatgtatgtgtgtattataatacatattagcctggctgagttcctaagacagaattattgagttctttctgctgatactatctataaggtaaaggaaaggttgaagctgactgatttgtctactcataactttatgaaagaataaataaatctagtattttacagggaatcaccaggaatgatcatatccaccagtcactgcaaggatggatataggtggaagatgacctggacgaaagaccaatcattccacacaagacagggaatacttcctgaacaggagagtcatttagccacttaactttggccaatgagttaatgcggacctggattttataatcagtaaaatgtgtgggttggagaagatgatctctgaggtcttcttacctgacactgaaaggaacacagggcaaaacaaaatcagcactggatacagcatcacagggtctgaattcaagagtcagctctgccatttcctgactgtgtaatcatgaagctatactttcccccctatttaaatctccctaagcctcagtttccttggatataaaatggggctaatacagcactttgggaggccaagacgggtggatcaactgaggtcggaagttcgagaccagcctgaccaacatgaagaaaccccgtctctactaaaaatacaaaattagccgggtgtggtggcgcatgcctgtaatcccagctactcaggaagctgaggcaggagaattgcttggaggcagaggttgcagtgagccgagatcacgccattgcaatccagcctgggcaacaagagcgacactctgtctcaaaaaacaaacaaacaaaaaaaacggggctaataacattcacaggttgttgtgcaaaccaaagatcaagaacgtgaacgtgctgtttcaggggaaaaagctgacttgctccaagtgttcgctcgggtaactggaaggtatgacctctgtcacaggatgcggagctgggctactgctgccagcagaagagaaagtcactatccagcagaaggtcaagagggctctcccaccacagtctcttcaatacagaccaaaatacttgacctgctgagctcagcctccttggttttgcctggaggagcaaacagtgacctaccaattagccaagagcttctgtaaagtggggcaaaggaaaggaaaaagaacaaaaaacaggtgacatgtgtgtttgtgggctggaagaaacgaagcagaaccctcagcttcttgccacacatccaggcctctgggaccaagccggggaaccagctgggacctctgggacccaggtccaggcctctgggaccaagctgaggaacacatttgcacgtgcaggcggaggggtatgacgcggggtgggggcgaggtcctgctttccaggccattcagtgttccttcagttctctgagcatagaggacaaggaaggtgggaggagggaggagagggaagagaggggtgaaggagcttgggggaggctgggaaagaaggaggaaaggagaggagggagagcagctcaggaaggcggaggaggaaagccctttgctgagctgagctgagccagacggggttactctcggtcagtgccctccagtccccagctcaggtttcaagatctgtcttctcttttgctcaacatgaaaaggaaccagagcaatcagctgctttagaagtgggtggaggaggcaaatgaaaaaaaaggagaagtagggaaaatcacatcagcatcccaggcccagatggtcttcttcaatggacccctggggtgggggtggggtggggcctcccagcctgctaggagctgtcaactgagcagggcctgggagcgggagacaaattctaactcgtggttttaatcagcctgagcttgtccagccttacaaataagaccttgaaatacttctctgttatacaagggctggtaacaaatacactccagtgtctttatggtatttttttggtgttttgttttcctgatgctctgctgtcttcttgaagaatagacgatgcctgcttcaccaatagctgagcactctctgggaagacctggttgttgggtgctgaggagaaggggtgaggcggggtgatgcagctgctccttcaggtgactccttagagcaggggagagtaggccaggggtgtgtggtacacacagcctaaggacacccatgctgttcatcccggcctgggctttccaacccaggagacacttccttctctacagagaaggctcaccgagggataccaagacatacctgaaaaaactcagttccagaattttccagttatgtggccttgggaaagtcagttaggctctctgagcctccatttttctgtaaatggaggtctagcttcctatacgtgtgggttaagttatcactaatgacactaagtgtgttaagtactctgaatgctgactcacacatactccttgagaaaatacaagctgaaaattaaacatgttcaaaataaatgtggataaagtcatagatgacaagctgtgaagaattcccaagagaaaccaggatatttaggcttatgctccctgaaccttccaaggcattaggaagccagagtcttctctttcaaccaatgggaataccataactttaggaaccacacattccttctagtattttacaaataatataaacttgtattagttcaacaaacttctgaatggctacagtacccaaaatactagtgttgtggttcaaagggataatatttttctcagtgctccttgaaggcaggagctagcctataacaaaagaggcgctgtgtaacaaaatccctgcccttgcattctaagaggagatggccagagggtcgggtgagcagagcggtgagcctccaaccctctctgccactccagaatcagtcagcactggaatcaggggtggaacgagacattactcatcttcccccagattactttgctagtaaggcaatagcacacctgctatgatttgaacgtgtcccccctcaaagttcatacattgaaacttcatcaccaatgtgacagtattaagaggcagggcctttaaggggtgattaagttatgtgagcagtgccctcaccaatagcattagggcccctcacagataccatgagtttcatgtgcgtctgtgtgaagagaccaccaaacaggctttgtgtgagcaataaagctgtttttttcacctggctgcaggtgggctgagtccgaaaagagagtcagcaaagggagataggggtggggccgttttataggatttgggaaggtaatggaaaattacagtcaaagggggttgttctctggtgggcaggggcagggggtcacaaggtgctcagtgggggagcttctgagccaggagaaggaaattcacagggttaatcactcagttaaggtggggcaggaacaaatcacaatggtggaacgtcatcagttaaggcg

SEQ ID NO: 800 - DNA, 4048 bp, Homo sapiens
aggggagagtaggccaggggtgtgtggtacacacagcctaaggacacccatgctgttcatcccggcctgggctttccaacccaggagacacttccttctctacagagaaggctcaccgagggataccaagacatacctgaaaaaactcagttccagaattttccagttatgtggccttgggaaagtcagttaggctctctgagcctccatttttctgtaaatggaggtctagcttcctatacgtgtgggttaagttatcactaatgacactaagtgtgttaagtactctgaatgctgactcacacatactccttgagaaaatacaagctgaaaattaaacatgttcaaaataaatgtggataaagtcatagatgacaagctgtgaagaattcccaagagaaaccaggatatttaggcttatgctccctgaaccttccaaggcattaggaagccagagtcttctctttcaaccaatgggaataccataactttaggaaccacacattccttctagtattttacaaataatataaacttgtattagttcaacaaacttctgaatggctacagtacccaaaatactagtgttgtggttcaaagggataatatttttctcagtgctccttgaaggcaggagctagcctataacaaaagaggcgctgtgtaacaaaatccctgcccttgcattctaagaggagatggccagagggtcgggtgagcagagcggtgagcctccaaccctctctgccactccagaatcagtcagcactggaatcaggggtggaacgagacattactcatcttcccccagattactttgctagtaaggcaatagcacacctgctatgatttgaacgtgtcccccctcaaagttcatacattgaaacttcatcaccaatgtgacagtattaagaggcagggcctttaaggggtgattaagttatgtgagcagtgccctcaccaatagcattagggcccctcacagataccatgagtttcatgtgcgtctgtgtgaagagaccaccaaacaggctttgtgtgagcaataaagctgtttttttcacctggctgcaggtgggctgagtccgaaaagagagtcagcaaagggagataggggtggggccgttttataggatttgggaaggtaatggaaaattacagtcaaagggggttgttctctggtgggcaggggcagggggtcacaaggtgctcagtgggggagcttctgagccaggagaaggaaattcacagggttaatcactcagttaaggtggggcaggaacaaatcacaatggtggaacgtcatcagttaaggcgaggcagggccttttcacttcttttgtgattcttcagttacttcaggccatctgggcgtatatgtgcaagtcacaggggatgcgatggcttggcttgggcttagaggcctgacaatgaggacccctataaaagggcttgagggagaggcttcagtcccttctgccagttgaggaaatggcgtttgtcccctcctaaggatgcagcaacaaggcaccatcttagaagcagagagcagccctcaccagacaccaaacctgccaacaccttgattttggatttcccagcctccagaactgtgagaagtaaatttctattgtgtataaattactcagtctcgagaattttcttctagcagcagaaacagaataagacaatacccatgtcttactgagaagagggaaggtgggagaagttactggaagtccctagaatgagggttgaagaccctgaatggtaacaattcccccaaagagccagtgcagccccagagggaaaggatgtcctggtcacactggccagggcgtggaagggcacagtcagcctggctttgaagctcagaaggaaatggaagataacactaagacataacattgacccaaatgaattttggacctgaacagaatgagaagaagaaacaaagaaccaacatcagaaaaagcaagaagatagctgagatgaaaactctacctgaagaccagagaggcagaaaaatgagagaggacagctggaagacaaaaggagtgaaaagaaggtaagagataggaagtatgaagaaacagagtccagaaacaggaaagactacatcaaacagaaggggaagagagaaaaagaaaagagagtttgaggcattcagttcccaaggatgagctggtctctcactgaaaaaagggaccagacacttcaaacaccacacaacatgggactagaatcagcctgcagggccctgagaagtccaggcacaaaaagaacggaaaaagatgagtttacaagttggggatgagattcttcctaaggctggtctagggaagaattaacatacacaatgtataaatagtttaatttttttctaacttttaaaattaacaaaatttattaagggacatagtagtgctttgtgggcacagaaaagtgactcatatttaccaagcattaggcacactattagcattattttccagaatctttaagaacagcctataaagaaacgtattattattcccatttttcaaatgaggaaacagatctggagaatatcttgctcagggtcatagaacaaacaagtggtaaatttgaacccaaacagctttgactgcaaagctttggttctttccactatatcagcaatttaatgagatgttttaaaaatgcttcatcgtgatattggcctcaaaagctggggatggcacctatgcttcctaatgttggaataagcaacatggcagcatagtgtggggagaaaatgctaagcctaggagtcagaccccgattcaacgtacaactttactctttaatcttggacaacagacattaccctttcgagcctcggtttcctcatcaatgaaatggagataataataccaatttgcccctgctagtgctgtttgaagccttcaatgtaataatatatgaaaaatgtaaaatggtatcattatccggtgcaacttagtctgttgaatagtgtcgcactgagattgccttttggtgcctcaatgcaacagtgacaagaggaccagaaatgggaaagctttcaatgagaaacaaactggactcccaaattgctctttgccacccacagaataaataaaccttatgctggaaaagcaggagacacgcaacactgttcttgatgttaacaattcaaaactttttaaaggcagtctgatatttgtggggatacacactattctgtaatcgaatgcaattgtgttttctattcttgtctgagtaaagctgatctttgatttgatttagttcaagtaatatttcaacattgcagtgcagcgttgctccccacccccacctgcttacagcccagctgggcccaggcccttgccctggatggaaatcaaagacctggtttctgagatgcagcctggctttgacaggtctgggaaaactcatggtagtggaaaggtttccaaatataaaattctaaggcctcaaatcaaaacttttgacaagtgcatacatacagaacgtgaattgcaatcacctaaagatttcaaagaatttccattttgatgacataatgttgacacatgtatcaccagatctcccaacaagatgacacactggggttccacaaggacagaaaatatagtctgaggctgtaacctcaactttagcagctgcctgaatgggtgagggggttcagacagaaaatgagaagtggctgtgagtcacaggatgttctttctagatgggccttgggaaacattccatcggtgcctgaagccaggaagtggagtgaatctggcatttctttcagaagccctcttgtctcctttctcatcccagccagcccatgccccatgtcctgtgactttagggaagcttctggctactcagagctgctctctttaggatataacaacaacagagcacgagaaactggaattctggtcctattactgccccttgccagctgtgctttcttaggcaagttacttggcctctctgaacttcggctccttcatgtgtgtatcccctgcattttatgatgattgtaaaa

SEQ ID NO: 801 - DNA, 4074 bp, Homo sapiens
ctgcagagggcatggctttatttggaaaatggcctgttgaaatcgaggagtagaaaaacacagggagaaacattaattccctgaagcgattttgaggctccatttatacaatgcttcatgccaagtctgtccgtcccattccccacatcccagagacctgtctcttctgaataaaactgactctcaggtggaaacttggcctcacatgccattcttaatctagtggacatcatctgtagaatggggttcatgataccagcgttggagaagtgatgagaggggtcctaagcagaaagtccctggcatccttagttcctctttgacagccagcctcagctctcagacatagaggggacttggggatgccctaagcctattttttcatactctaaggaggtaactacggtaagatgaagtgggctgggcacagtggctcgcgcctgtaatcccagcactttgggaggccaaggtgggcggatcacctgaggtcaggagttcaagaccaccctggccaacatggcgaaaccctgtctctactaagcatacaaaaattcgatgggcttggtggcaggcgcctgtaatcccaggtactctggaggctgaggcaggagaatcgcttgaactcaggagggggaggttgcagtgagccaagatcgcgccatttcactccagcctgggcgacaagagcgaaactccatttcaaaaaaataaaaataaataaaataagataaagtgactgacaaagaacactcgcaaagtcagctggcgtgactgggagtagaacccccatctccatggtcccaatccaagcctcttcctcacacctgcggttagattggaatttagctcatctcaaacccctctggtactctcctccatctgccaaacatttgtcagtttcacctcctctgccagctacaaagctcctcaagggcacctgaaaaacacacaggcttggggtctgatgtcatctgtgaagcttcgggggttttgttgttattattgttgttttgtcactaattaaaacaatgaggccccatgcactaggtcatcctcttgctctcctctttctttcttacaatgagcttcttaccaaaaggatgatgggacatatttgggcttggtcctaggattcggtctggcacagtttggtttgcggccgtaatacatggatgctgcttatgaggatcaagattaataggccctggacgaggggctcttaacccaaggacctgttcaggtatggacagaaaggccagagctcctgcttctatcatattctcagggctatttgtgaccccaaaagagttcacagttatcaagaaccacagctctaggtggtgaagaacaagtagcttcacaggctttggagtcaaaccaattggaattcacatccagtccctgcagcttgctaagcagtgactttagccaagtcattgaccccataccctcagttttctcatctgtaaaatggtgataaaagtacaattaacttcacagagctgtggtgagcatcgcatgagaccttgcaggcaaagcgtttttgcagagtgcctggtgtaggacaaagactcaacaaatgagcctatgaggattttccaggcactgtgggagtgaatctaccccagcacttactctgctgttgcccagcaggaacactccttccatctcacagctaccacctccctccaaagtgggaaccttgttttattcatctttttattttcatgcaaatgggctgagaagttaatccaaagtcaggacttgctgcactttgcatttcaatatagggtctttctttcttttctatccatactccaaccagagaggcaacacccaaagcaaggatgtgataagatctgatcactgtggccaccctctgcagggactctggcctattgaacatttacacagttaatctccctatcttcctgttaatagttcaaggaaaaccaaacaaggccccttgcctaagtcagctgctcttcattcagggagatttatgtaacccaaccaaatactcaaaggaccaaaagattctcccctttcaatgccaggagacactggcactgtagacagactggcataggtgaaaagcagcacagggcagtgatggtgaaggtatttcaggttatcccttagcaggggtggcaaaggcccttccttgtacgttgtgccccatcctatttgcaaacaaaagtaggatcaggactaggcagtgggtgtacaggaagacaagtaaataatataatgggctctcaggacccagggaagtttttaagaccttgataactctggtttgaactggggaagatttacagagaatttcaaaccagtcctttgttcctagggacaagacacctctccaagtttcaccttaacttttaactctgctcttccaactaggtccctggagggtgatgagaaaagaaggtaaggttgcaagaagtgcatggatatggccgggcatggtggctcatgcctgtaatcccagcactttgggaggctgaggcgggcgaatcacctgaggccaggagttcgagaccagtgtggtcaacatggcaaaaccctgtctctactaaaaatacaaaaattagccggacgtggtggcacatgcctgtagtctcagctatttgggaggctgaggcaggaggctcactggaacctgggaggcagacattgtagtgagcggagattgcactactgcactccagtctgggcaacagagcaagaccatctcaaaacaaacaaacaaagaagtgcatagatgtaaggaaaagtctcatttaccatcagtatatacaagaatttcagaacttttctgaaaatttatgatctggagtcagaggaatctaggttaaaactcaacaatctgcccaagatcacaacctcggtgaagggcagaggcaggatacaaacaaaccccaacttgtctgatgccgaagacatttgctatttccactacaccatcttgcctgcttgtaatcattccagaaaatcattcgtctagtagatgaaaaaactgagtttgcccttgaaacttatacttcagtggtgcttggcataatgcttaaataaaatctaaaatgtatttgctcatcaatcaaaaaaatctctttggggttccaaaagagaaaacagaattatctcacaggcatataaattgcatataaatttcagtttatgcttttttttttttttttttttttgagacagagtctcactctgttgcccaggctggagtgcaatggcgcaatctcggctcactgcaacctcagcctcgcaggttgaagcaattctcctgcctcagcctccccagtagctgggattacaggtgtgcgccaccacgcctggctaatttttgtatttttagtagagacgaggttccaccgtgttggccaggctggtttcaaactcctgacctcaagtgatccacccaccttgacttcccactgtgcctggcccgctcttttcttttttgatgaaatcaggaaatcacgtctcagaaaatgtttcttgaggggtgtgtgtgtgtgtgtgtgtgtgtgtgtgtgtttaatatgactatgtgtgatgtgcattagaaaatcagcaagtaaataactgttgctatatattgtgagaaagatgggaccaggccaagaaacacaattaaaaggtggccctggccccactgctttcctggaagaacagtatctcataagcttgtgggtctcgtaggggtatggactgagctgcttagtggtaggaaaaatcactagggcagtgaaactgaagtcccagctacatttcccagctacgtaaatgttgatcctttagatctggccatttctgcagtgtcaatccacccactgagcccagccctaagagaaagactgtgattgtaagatgatacactgacaataataatatgaggtaggtattactattctctgtttaaaagaaacttaaatcacttgtccaaggtcatatgcttagtgaatgctgacaccagaattcatacccagataacctgacatctggagcctgtgttgttagccactactgtattttctatgctcactgtaaaggctg

SEQ ID NO: 802 - DNA, 4058 bp, Homo sapiens
ccctccaaagtgggaaccttgttttattcatctttttattttcatgcaaatgggctgagaagttaatccaaagtcaggacttgctgcactttgcatttcaatatagggtctttctttcttttctatccatactccaaccagagaggcaacacccaaagcaaggatgtgataagatctgatcactgtggccaccctctgcagggactctggcctattgaacatttacacagttaatctccctatcttcctgttaatagttcaaggaaaaccaaacaaggccccttgcctaagtcagctgctcttcattcagggagatttatgtaacccaaccaaatactcaaaggaccaaaagattctcccctttcaatgccaggagacactggcactgtagacagactggcataggtgaaaagcagcacagggcagtgatggtgaaggtatttcaggttatcccttagcaggggtggcaaaggcccttccttgtacgttgtgccccatcctatttgcaaacaaaagtaggatcaggactaggcagtgggtgtacaggaagacaagtaaataatataatgggctctcaggacccagggaagtttttaagaccttgataactctggtttgaactggggaagatttacagagaatttcaaaccagtcctttgttcctagggacaagacacctctccaagtttcaccttaacttttaactctgctcttccaactaggtccctggagggtgatgagaaaagaaggtaaggttgcaagaagtgcatggatatggccgggcatggtggctcatgcctgtaatcccagcactttgggaggctgaggcgggcgaatcacctgaggccaggagttcgagaccagtgtggtcaacatggcaaaaccctgtctctactaaaaatacaaaaattagccggacgtggtggcacatgcctgtagtctcagctatttgggaggctgaggcaggaggctcactggaacctgggaggcagacattgtagtgagcggagattgcactactgcactccagtctgggcaacagagcaagaccatctcaaaacaaacaaacaaagaagtgcatagatgtaaggaaaagtctcatttaccatcagtatatacaagaatttcagaacttttctgaaaatttatgatctggagtcagaggaatctaggttaaaactcaacaatctgcccaagatcacaacctcggtgaagggcagaggcaggatacaaacaaaccccaacttgtctgatgccgaagacatttgctatttccactacaccatcttgcctgcttgtaatcattccagaaaatcattcgtctagtagatgaaaaaactgagtttgcccttgaaacttatacttcagtggtgcttggcataatgcttaaataaaatctaaaatgtatttgctcatcaatcaaaaaaatctctttggggttccaaaagagaaaacagaattatctcacaggcatataaattgcatataaatttcagtttatgcttttttttttttttttttttttgagacagagtctcactctgttgcccaggctggagtgcaatggcgcaatctcggctcactgcaacctcagcctcgcaggttgaagcaattctcctgcctcagcctccccagtagctgggattacaggtgtgcgccaccacgcctggctaatttttgtatttttagtagagacgaggttccaccgtgttggccaggctggtttcaaactcctgacctcaagtgatccacccaccttgacttcccactgtgcctggcccgctcttttcttttttgatgaaatcaggaaatcacgtctcagaaaatgtttcttgaggggtgtgtgtgtgtgtgtgtgtgtgtgtgtgtgtttaatatgactatgtgtgatgtgcattagaaaatcagcaagtaaataactgttgctatatattgtgagaaagatgggaccaggccaagaaacacaattaaaaggtggccctggccccactgctttcctggaagaacagtatctcataagcttgtgggtctcgtaggggtatggactgagctgcttagtggtaggaaaaatcactagggcagtgaaactgaagtcccagctacatttcccagctacgtaaatgttgatcctttagatctggccatttctgcagtgtcaatccacccactgagcccagccctaagagaaagactgtgattgtaagatgatacactgacaataataatatgaggtaggtattactattctctgtttaaaagaaacttaaatcacttgtccaaggtcatatgcttagtgaatgctgacaccagaattcatacccagataacctgacatctggagcctgtgttgttagccactactgtattttctatgctcactgtaaaggctgttatcaaaatacatgattgacagatgatctgagttctattcaaggttgttatgagaataaaataaaataatattagtaaaactgagaagttctacacaaatgctgcttaaaattctgtgttccatgatttgcaatgtgtgattaagacatcatgcatatggaaaagactaggtgttaaggcattatcttaaatgtgcttttaatcaccactttctaaaattatcagtaaggttattctattttcatgatttaaaatgtgtaaaagagatgttgtctactgttataattacaattatcaccattcactaggactgaaaacagtctcctgagttcatgccttatcaacaaattagaagcctaggttttctgatccaaagcatgtgtgatgtttcccaaagacagcatctttggaaaagtccaatttagcccacgttaattgcctggattttccctgccattggtgagtctcaggcaacatccacagttacttacattcatgttgttcatagggtgggtagctcagccgaacagagatcaggatcaggaagataaatagaggccaggccacttccagcagcagctgacactgagtgggaaataagatagaacactgtaaatttaaaaataatatggatatccaatgccactgggatctgggaaatccacagacaacttcatttactaattaatcaacttctccagtctctcccaccactctctaagctttaacagaactgtttggagtcccaaccttttaacataccattccatatacctctgtgtcttcccttaggtaagggaagatgcttcctatcgtgctttatctggttcacttctattcattcttcaggattcatcgtggcataatttcctttactaaaatctcagcctgagctagaagccctcctcctgtgctactccagtaacccaggcacactcctcctgtagcattttcctggagctcctgaaatcatctgtttctgttgctggcttcctcagcacattgagcactctgaaagcaggcacccatctgtctgcattcccagccttagcatagtgccaggtatgtggtgactatgttgagaggagaggaccaggccaacctgctgtgctaaatacacacaacccttgctcctctaattgcacacaaagctgctccctatggggcagagaagagggctctcaaagacaatgaaaattcacacatagttccatattgacctgtgtgcactcaggactgtaaagagagagtgcaaagtccttccccatctgtccaggtctggtcatcatcttctccgatgagttaaaaagatcattgaacttctaaacaagcatgatacactggttaaaacaatgaggtttctccaaaggaaaaccctgcctcagtgagttaccaggcgataaattagcagacggacaagatggaaatcactagacacaatataattgagccagtagtgttcagacaactagttacactgcctgaagtctatcacctctcccattcctttcatttctatattccaacgttgtaatcaagataaacaccaaagagcccaaaagagtcacagggccttgtgtttcagagtaattataacttacaactgtggcttcagagtcacacagccaagataatactggtataaaatccctttttgtcttcttttt

SEQ ID NO: 803 - DNA, 4041 bp, Homo sapiens
gtcctggggatctcagcttctggttgcagctcagttgctggctgggtgacctcaagaaatcccttccctgctttgtacctcagctttctcatccgtaaaataagaggttcagactagactaccccagagccatagcccccctttcattgccaacatgatatgattcttcccactactcactaatggacacacaacatggataaaccatggcggagacaatttcccagcaagtgggccccctctaccaggataagaaggggcaggagccctggatcacactgtagcaaaggaataagagtaaggacggacatagaggactggaacaccaagacctggggataaccacgggaggcagggagaaaggcaaggaaggagtcagaaacttcaatattctcagatggagaataggcaaaataatgacaccactgaaaagcgattaggcacattgagttagagtgccagctccaaagtcagattatctggatttgaaccctacctgtgctccttgttagtggtgtggacctcagacaagttacttaacctctctgagtagcacgttccccagctacaacatgtggaaataacagtacatcgcggggccttaaaaggaataaatctagttaataatgcctaatcagttagtgcctcacacatggaagctcattctaagtgtttgcttttattttattaatataatattatctattatactttacaattattattaaaacagataggatccacagattccagtccctgttctctcactagagacctcagaattcaggttccccatttgtaacatgagaggctgaacacaatcagtttttctcaaaggaagatctgtatacatattgctgagggattatatttaagttctctaagaggattttaaacactttgttttcatttcaacagtcatctaaacaaagtctaataaacacatatggattttttaaatgcttactttaaagccaagttctggcacaagatttcaaagcccaagtttatatttgtgtttatgattgtgttggcaccagtataattgtagcaaactcatgaggatggaacaggtgccatcaaattaaggtcatacaagtagaaaaatgggtggagaattcaatcattagcacatgataatatagactggccaaactcaaaatgatcagcatgatagcatttactgccatgcaacttataatttggtttcagttgaacaacagctgcctcaccacatttaaggtattaatttgaatggtattgattttgcaattttggctgcacttaatttgtaaatatgtatgggtcatatagttgtataataacagcctataagaagtttatacctacttttacttcctaatatttaagtaacactataataaaaaaggaaatttagtgaacaaaaggatgctttgacacttttgttcttttacagacagtgcaagcattattctagtttgaggaaaactgaatgaaattctctccaaagtcccttatagccctttgaatctcagaaagatgatcattttgattacagacatgttaagctacattaagacagccaagtggggatactggcttagaatccaggaaaaaaaaataaaggcagaacaggaacaagagacttagaaactaactacagagaaatgcatcctagagatgggatctctaaggaagggtgttcagagatagagagacaaagagctgacgtctgagtttcagggagttcactctgctctacagccctcacatccctctgtggaagagttccattcacctgcgcattaaagatgatctccagattactcaaagcattattggcccatctgggaagtgaatggcttagaaccctctgcagaaataaaacaagtctcagttattatattcctccaggcctgaaggaaagaatccagattgacaccaagatacccagtattgatctctaagagtggggccactaactcacttcacccacagcttccagaaatacaggggcccattaggggcttttggagagccaggtggctcccagggctgcagcaaaaggaaaaagtggggtgctcaggggcgattcggagccaggtcctagggatcagaactcatgcctgggcagtagcacaaaccaaagctactatttctacctggctgcaaatctgccctctatgataagccacatgccatatccggaccacacagtcctgtgtccataagagccagattccatcaatccctgtgtgaaaaccaacacagcttccttccctccctccctcctccaatccccaactcaaaaccacaaagaaaaaatgagagaaccccccgctgctgaaaaacccaagcttactgtttgtcttcttctgaaagtgaggttcttccacagcagcaacctcagctgaggccaacaagccatgttccctcagccagcacccccagcgtgtggctcgggagccctggaaggcagcggccagagctcacagcagggacgccgtggctggtcattaactgaaagataaagcaggaggggaaacagccatcagttattgctgcaaagccatacaccaatgaggactgctaatccagccctctcagctgagacctccaacacacagctctgcatcatgactgcttctcaatggatcatgagtcaccagctcccagcctctgggttcacccacaaagagggactcgggaggtgttccgacagcaggctaggagctacgtgttatggtcctaatcattttagttctatagatgttatcatctgggaatgaagaatgcatttctgaaaatagacctctctcaggtggccaaaaacactgaggatggaaatggcatactggaatcccagagacctacctctcttttctaagaaaatgcctccccttacatacaaagtcagcagcatttgtaaattttgcctcaagcctggagtgacttatactattccctgaacttccttacatactaattttcagtgggttatacaactgagtccttcaaatgataaaaagcaccatcggccaggcgtggtggctcaagcctataatcccagcactttgggaggccgaggcaggcggatcacgaggtcaagaaatcgagaccatcctagccaatacggtgaaaccccgtctctactaaaaatacaaaaattagctgggcatggtggcaggcacctgtagtcccagctacttgggaggctgaggcaggagaatcgctgaacctggcaggcggaggtgcagtgagccaagattgtgccactacactccagcatggcgacagagcgagactctgtctcaaaaaaaaaaaaaaaaagcaccatcaataaagcagtttcctaatctggaaaaccacaacgtgccttagatgagtgtgagtaaacaccaagaaaatgctaccgacacctggctctcaggtaatgaggacaaccctagcgctgtgtctctggaaagaaaacagcatcccatggagaaacaagtctgctatggcaggctcagggcatcaactgtgaaaccgacaaacaagctcccatggtcagcacatatgcacacttctggccttgttccacctgcacctgaacacaccgcccccctactccgttgggtgtcacaggtgcctccttggaggactgtttgccatgctagggcaagaaggtcttctcgtgaacaagggatactacattctgtgtatcccagccacccatccagcagttacccttatttaatgctggaatagtcccaagtagttatattaaagttaaagctggggagggggcagaagatgaaaaatggaagggaggacacacaggtgaaaattcggccctgctggcacttggtagccatgaactctcctagctgtgcttatgaaatggctcagtgaatcactgtggcctctagaggagtaggggcaagggtagggtgggacactgggcatgaggaacaaggagcagaaggaactaagaatgcagtagcgaggtatggatacaaaaccaagcgctagactagaaatctgtgagtccaaatgagatctccatgccaaggtcag

SEQ ID NO: 804 - DNA, 4040 bp, Homo sapiens
atttgaaccctacctgtgctccttgttagtggtgtggacctcagacaagttacttaacctctctgagtagcacgttccccagctacaacatgtggaaataacagtacatcgcggggccttaaaaggaataaatctagttaataatgcctaatcagttagtgcctcacacatggaagctcattctaagtgtttgcttttattttattaatataatattatctattatactttacaattattattaaaacagataggatccacagattccagtccctgttctctcactagagacctcagaattcaggttccccatttgtaacatgagaggctgaacacaatcagtttttctcaaaggaagatctgtatacatattgctgagggattatatttaagttctctaagaggattttaaacactttgttttcatttcaacagtcatctaaacaaagtctaataaacacatatggattttttaaatgcttactttaaagccaagttctggcacaagatttcaaagcccaagtttatatttgtgtttatgattgtgttggcaccagtataattgtagcaaactcatgaggatggaacaggtgccatcaaattaaggtcatacaagtagaaaaatgggtggagaattcaatcattagcacatgataatatagactggccaaactcaaaatgatcagcatgatagcatttactgccatgcaacttataatttggtttcagttgaacaacagctgcctcaccacatttaaggtattaatttgaatggtattgattttgcaattttggctgcacttaatttgtaaatatgtatgggtcatatagttgtataataacagcctataagaagtttatacctacttttacttcctaatatttaagtaacactataataaaaaaggaaatttagtgaacaaaaggatgctttgacacttttgttcttttacagacagtgcaagcattattctagtttgaggaaaactgaatgaaattctctccaaagtcccttatagccctttgaatctcagaaagatgatcattttgattacagacatgttaagctacattaagacagccaagtggggatactggcttagaatccaggaaaaaaaaataaaggcagaacaggaacaagagacttagaaactaactacagagaaatgcatcctagagatgggatctctaaggaagggtgttcagagatagagagacaaagagctgacgtctgagtttcagggagttcactctgctctacagccctcacatccctctgtggaagagttccattcacctgcgcattaaagatgatctccagattactcaaagcattattggcccatctgggaagtgaatggcttagaaccctctgcagaaataaaacaagtctcagttattatattcctccaggcctgaaggaaagaatccagattgacaccaagatacccagtattgatctctaagagtggggccactaactcacttcacccacagcttccagaaatacaggggcccattaggggcttttggagagccaggtggctcccagggctgcagcaaaaggaaaaagtggggtgctcaggggcgattcggagccaggtcctagggatcagaactcatgcctgggcagtagcacaaaccaaagctactatttctacctggctgcaaatctgccctctatgataagccacatgccatatccggaccacacagtcctgtgtccataagagccagattccatcaatccctgtgtgaaaaccaacacagcttccttccctccctccctcctccaatccccaactcaaaaccacaaagaaaaaatgagagaaccccccgctgctgaaaaacccaagcttactgtttgtcttcttctgaaagtgaggttcttccacagcagcaacctcagctgaggccaacaagccatgttccctcagccagcacccccagcgtgtggctcgggagccctggaaggcagcggccagagctcacagcagggacgccgtggctggtcattaactgaaagataaagcaggaggggaaacagccatcagttattgctgcaaagccatacaccaatgaggactgctaatccagccctctcagctgagacctccaacacacagctctgcatcatgactgcttctcaatggatcatgagtcaccagctcccagcctctgggttcacccacaaagagggactcgggaggtgttccgacagcaggctaggagctacgtgttatggtcctaatcattttagttctatagatgttatcatctgggaatgaagaatgcatttctgaaaatagacctctctcaggtggccaaaaacactgaggatggaaatggcatactggaatcccagagacctacctctcttttctaagaaaatgcctccccttacatacaaagtcagcagcatttgtaaattttgcctcaagcctggagtgacttatactattccctgaacttccttacatactaattttcagtgggttatacaactgagtccttcaaatgataaaaagcaccatcggccaggcgtggtggctcaagcctataatcccagcactttgggaggccgaggcaggcggatcacgaggtcaagaaatcgagaccatcctagccaatacggtgaaaccccgtctctactaaaaatacaaaaattagctgggcatggtggcaggcacctgtagtcccagctacttgggaggctgaggcaggagaatcgctgaacctggcaggcggaggtgcagtgagccaagattgtgccactacactccagcatggcgacagagcgagactctgtctcaaaaaaaaaaaaaaaaagcaccatcaataaagcagtttcctaatctggaaaaccacaacgtgccttagatgagtgtgagtaaacaccaagaaaatgctaccgacacctggctctcaggtaatgaggacaaccctagcgctgtgtctctggaaagaaaacagcatcccatggagaaacaagtctgctatggcaggctcagggcatcaactgtgaaaccgacaaacaagctcccatggtcagcacatatgcacacttctggccttgttccacctgcacctgaacacaccgcccccctactccgttgggtgtcacaggtgcctccttggaggactgtttgccatgctagggcaagaaggtcttctcgtgaacaagggatactacattctgtgtatcccagccacccatccagcagttacccttatttaatgctggaatagtcccaagtagttatattaaagttaaagctggggagggggcagaagatgaaaaatggaagggaggacacacaggtgaaaattcggccctgctggcacttggtagccatgaactctcctagctgtgcttatgaaatggctcagtgaatcactgtggcctctagaggagtaggggcaagggtagggtgggacactgggcatgaggaacaaggagcagaaggaactaagaatgcagtagcgaggtatggatacaaaaccaagcgctagactagaaatctgtgagtccaaatgagatctccatgccaaggtcagtctctagtagaacaatacccttttatctaccacccaacaaggacttggattaaaacttctagaaaagtcaagagattggaggaaattgcagtgtctgagaagaaaagacagcctaccactatgtattccaattcattcattgacagtccaataaatcaagaaattctctgaaatagtcaagccttaggacctatttcttttccttaccatttgctcagcaaacttctagaaggacacaggcctccaaagtttcttactccaaaaagaggaagagttaaaccagcactgcatcagtttgttcaaagatgacaactggcagcacagcactggcaaccagagcagcattgtgagacacatgcttgtcatcccaaattgttttctaagtggctcaggacagagcttgcattccagagacactgaaataaataattagctagatttttctcatacagaagctgctctccaggaatcagttcgttgat
